(19) United States
(12) Patent Application Publication
(10) Pub. No.: US 2014/0154681 A1
(43) Pub. Date: Jun. 5, 2014

(54) Methods to Predict Breast Cancer Outcome

(71) Applicant: NANOSTRING TECHNOLOGIES, INC., SEATTLE, WA (US)

(72) Inventor: Brett Wallden, Mill Creek, WA (US)

(21) Appl. No.: 14/078,009

(22) Filed: Nov. 12, 2013

Related U.S. Application Data
(60) Provisional application No. 61/725,079, filed on Nov. 12, 2012.

(51) Int. Cl. C12Q 1/68

(52) U.S. Cl. CPC C12Q 1/6886
USPC 435/6.11

(57) ABSTRACT

The present invention provides methods for predicting the outcome of a subject having breast cancer. The prediction model is based on the gene expression profile of the genes listed in Table 1A or 1B. Further provided are compositions and methods for predicting outcome or response to therapy of a subject diagnosed with or suspected of having breast cancer. These methods are useful for guiding or determining treatment options for a subject afflicted with breast cancer. Methods of the invention further include means for evaluating gene expression profiles, including microarrays and quantitative polymerase chain reaction assays, as well as kits comprising reagents for practicing the methods of the invention.

### CROSS-REFERENCE TO RELATED APPLICATIONS

[0001] This application claims priority to, and the benefit of, U.S. Provisional Application No. 61/725,079, filed Nov. 12, 2012, the contents of which are incorporated herein by reference in its entirety.

### FIELD OF THE INVENTION

[0002] This disclosure relates generally to the field of cancer biology, and specifically, to the fields of detection and identification of specific cancer cell phenotypes and correlation with appropriate therapies.

### BACKGROUND OF THE INVENTION

[0003] Current approaches to treating early breast cancer, including adjuvant therapy, have indeed improved survival and reduced recurrence. However, the risk of recurrence may be underestimated in some patients, but overestimated in others.

[0004] While the risk of recurrence does diminish somewhat over time, ongoing risk has been observed in many studies, some of them involving tens of thousands of patients with breast cancer. In fact, some of the patients who experienced recurrence after five years in these studies had previously been considered “low risk”—for example, their cancer had not spread to the lymph nodes at the time of their initial diagnosis, or their estrogen receptor status was positive. In one of these studies, a substantial number of recurrences occurred more than five years post-treatment. Thus, there is a need in the art to determine risk of recurrence and determine therapies which reduce that risk and improve overall survival.

### SUMMARY OF THE INVENTION

[0005] The present invention provides methods of predicting outcome in a subject having breast cancer including: providing a tumor sample from the subject; determining the gene expression profile of the tumor sample wherein the gene expression profile is based on the expression of a subset of the genes listed in Table 1A or 1B; correlating the gene expression profile of the tumor sample to the average gene expression profile (centroid) of a normal non-tumor subtype; and determining whether the subject has a more favorable outcome or a less favorable outcome based on a correlation value. The subset of genes is at least 4 of the genes listed in Table 1A or 1B.

[0006] The expression of the members of the gene list in Tables 1A or 1B, or a subset thereof, can determined using the nanoreporter code system (nCounter® Analysis system) or other gene expression technologies well known in the art.

[0007] The average gene expression profile (centroid) of a normal non-tumor subtype can be constructed from more than one non-cancerous breast tissue sample. Preferably, the non-cancerous breast tissue sample is a breast reduction mammoplasty sample.

[0008] A correlation value closer to +1 indicates a lower risk of recurrence. A correlation value closer to −1 indicates a higher risk of recurrence.

[0009] The sample can be a sampling of cells or tissues. The tissue can be obtained from a biopsy. The sample can be a sampling of bodily fluids. The bodily fluid can be blood, lymph, urine, saliva or nipple aspirate.

[0010] While the disclosure has been described in conjunction with the detailed description thereof, the foregoing description is intended to illustrate and not limit the scope of the disclosure, which is defined by the scope of the appended claims. Other aspects, advantages, and modifications are within the scope of the following claims.

[0011] The patent and scientific literature referred to herein establishes the knowledge that is available to those with skill in the art. All United States patents and published or unpublished United States patent applications cited herein are incorporated by reference. All published foreign patents and patent applications cited herein are hereby incorporated by reference. Genbank and NCBI submissions indicated by accession number cited herein are hereby incorporated by reference. All other published references, documents, manuscripts and scientific literature cited herein are hereby incorporated by reference.

[0012] While this disclosure has been particularly shown and described with references to preferred embodiments thereof, it will be understood by those skilled in the art that various changes in form and details may be made therein without departing from the scope of the disclosure encompassed by the appended claims.

### BRIEF DESCRIPTION OF THE DRAWINGS

[0013] FIG. 1 is a heatmap of the normal subtype (as well as the subtypes Basal-like, Her2-enriched, Luminal A and Luminal B) and the genes of Table 1B.

[0014] FIG. 2 is a schematic of the assay for determining normal tissue risk score.

[0015] FIG. 3 is a schematic of the algorithm process.

[0016] FIG. 4 is 2 graphs showing the comparison of normal tissue risk scores compared to ROR scores generated for hormone receptor positive subtype in BC noAST and BC-TAM patient cohorts.

[0017] FIG. 5 is a series of graphs showing the comparison of normal tissue risk scores compared to ROR scores generated for the Basal-like, Her2+-Enriched, Luminal A, and Luminal B subtypes.

[0018] FIG. 6 is a C-index analysis comparing the accuracy of the Normal centroid to ROR and Proliferation score

### DETAILED DESCRIPTION OF THE INVENTION

[0019] The present invention provides methods of predicting outcome in a subject having breast cancer including: providing a tumor sample from the subject; determining the gene expression profile of the tumor sample wherein the gene expression profile is based on the expression of a subset of the genes listed in Tables 1A or 1B; correlating the gene expression profile of the tumor sample to the average gene expression profile (centroid) of a normal non-tumor subtype; and determining whether the subject has a more favorable outcome or a less favorable outcome based on a correlation value. The correlation to the normal centroid can also be calculated in combination with other clinicopathological factors to provide a highly effective estimate of risk.

[0020] The method can further include determining at least one of, a combination of, or each of, the following clinical variables: tumor stage, tumor grade, tumor ploidy, nodal status, estrogen receptor expression, progesterone receptor expression, and HER2/ERBB2 expression. The breast cancer can be hormone receptor positive. The breast cancer can be ER positive or HER2 negative. The breast cancer can be early stage breast cancer. The breast cancer can be invasive or non-invasive (i.e., ductal carcinoma in situ).

[0021] The method provides an estimate of risk for specific outcomes. The outcome can be breast cancer specific survival, cancer recurrence, event-free survival or response to therapy.

[0022] The tumor sample is a breast tumor sample, e.g., obtained from a biopsy. For example, the tumor sample is a formalin fixed-paraffin embedded (FFPE) sample.

[0023] The subject has or is suspected of having breast cancer. For example, the subject is diagnosed with or has early-stage hormone receptor positive breast cancer. Hormone receptors include, for example, estrogen receptor (ER), human epidermal growth factor receptor 2 (also known as Her2, Neu, or ErbB-2) and progesterone receptor. In some cases, the subject may be Her2 negative. In some cases, the subject may be ER positive. In some cases, the subject may be ER positive and Her2 negative.

[0024] The genes listed in Table 1A and 1B are genes statistically selected to have low variation in expression between biological sample replicates from the same individual and high variation in expression across samples from different individuals (Perou et al. (2000) Nature 406:747-752). In some embodiments, the gene expression profile is determined from a subset of the genes listed in Table 1A or 1B.

TABLE 1A
Genes detected for calculating a normal risk score.

| GENE NAME/ | | |
|---|---|---|
| GENBANK | | SEQ |
| ACCESSION | | ID |
| NUMBER | SEQUENCE | NO |
| ACTB | ACCGCCGAGACCGCGTCCGCCCCGCGAGCACAGAGCCTCGCCTTTGCCGATCCGCCGCCCGTCCACACCC | 1 |
| NM_001101.3 | GCCGCCAGCTCACCATGGATGATGATATCGCCGCGCTCGTCGTCGACAACGGCTCCGGCATGTGCAAGGC | |
| | CGGCTTCGCGGGCGACGATGCCCCCCGGGCCGTCTTCCCCTCCATCGTGGGGCGCCCCAGGCACCAGGGC | |
| | GTGATGGTGGGCATGGGTCAGAAGGATTCCTATGTGGGCGACGAGGCCCAGAGCAAGAGAGGCATCCTCA | |
| | CCCTGAAGTACCCCATCGAGCACGGCATCGTCACCAACTGGGACGACATGGAGAAAATCTGGCACCACAC | |
| | CTTCTACAATGAGCTGCGTGTGGCTCCCGAGGAGCACCCCGTGCTGCTGACCGAGGCCCCCCTGAACCCC | |
| | AAGGCCAACCGCGAGAAGATGACCCAGATCATGTTTGAGACCTTCAACACCCCAGCCATGTACGTTGCTA | |
| | TCCAGGCTGTGCTATCCCTGTACGCCTCTGGCCGTACCACTGGCATCGTGATGGACTCCGGTGACGGGGT | |
| | CACCCACACTGTGCCCATCTACGAGGGGTATGCCCTCCCCCATGCCATCCTGCGTCTGGACCTGGCTGGC | |
| | CGGGACCTGACTGACTACCTCATGAAGATCCTCACCGAGCGCGGCTACAGCTTCACCACCACGGCCGAGC | |
| | GGGAAATCGTGCGTGACATTAAGGAGAAGCTGTGCTACGTCGCCCTGGACTTCGAGCAAGAGATGGCCAC | |
| | GGCTGCTTCCAGCTCCTCCCTGGAGAAGAGCTACGAGCTGCCTGACGGCCAGGTCATCACCATTGGCAAT | |
| | GAGCGGTTCCGCTGCCCTGAGGCACTCTTCCAGCCTTCCTTCCTGGGCATGGAGTCCTGTGGCATCCACG | |
| | AAACTACCTTCAACTCCATCATGAAGTGTGACGTGGACATCCGCAAAGACCTGTACGCCAACACAGTGCT | |
| | GTCTGGCGGCACCACCATGTACCCTGGCATTGCCGACAGGATGCAGAAGGAGATCACTGCCCTGGCACCC | |
| | AGCACAATGAAGATCAAGATCATTGCTCCTCCTGAGCGCAAGTACTCCGTGTGGATCGGCGGCTCCATCC | |
| | TGGCCTCGCTGTCCACCTTCCAGCAGATGTGGATCAGCAAGCAGGAGTATGACGAGTCCGGCCCCTCCAT | |
| | CGTCCACCGCAAATGCTTCTAGGCGGACTATGACTTAGTTGCGTTACACCCTTTCTTGACAAAACCTAAC | |
| | TTGCGCAGAAAACAAGATGAGATTGGCATGGCTTTATTTGTTTTTTTTGTTTTGTTTTGGTTTTTTTTTT | |
| | TTTTTTGGCTTGACTCAGGATTTAAAAACTGGAACGGTGAAGGTGACAGCAGTCGGTTGGAGCGAGCATC | |
| | CCCCAAAGTTCACAATGTGGCCGAGGACTTTGATTGCACATTGTTGTTTTTTTAATAGTCATTCCAAATA | |
| | TGAGATGCGTTGTTACAGGAAGTCCCTTGCCATCCTAAAAGCCACCCCACTTCTCTCTAAGGAGAATGGC | |
| | CCAGTCCTCTCCCAAGTCCACACAGGGGAGGTGATAGCATTGCTTTCGTGTAAATTATGTAATGCAAAAT | |
| | TTTTTTAATCTTCGCCTTAATACTTTTTTATTTTGTTTTATTTTGAATGATGAGCCTTCGTGCCCCCCCT | |
| | TCCCCCTTTTTTGTCCCCCAACTTGAGATGTATGAAGGCTTTTGGTCTCCCTGGGAGTGGGTGGAGGCAG | |
| | CCAGGGCTTACCTGTACACTGACTTGAGACCAGTTGAATAAAAGTGCACACCTTAAAAATGAAAAAAAAA | |
| | AAAAAAAAAAAAAAAAAAAAAAAAAAAAAAAA | |
| GAPDH | GGCTGGGACTGGCTGAGCCTGGCGGGAGGCGGGGTCCGAGTCACCGCCTGCCGCCGCGCCCCCGGTTTCT | 2 |
| NM_002046.4 | ATAAATTGAGCCCGCAGCCTCCCGCTTCGCTCTCTGCTCCTCCTGTTCGACAGTCAGCCGCATCTTCTTT | |
| | TGCGTCGCCAGCCGAGCCACATCGCTCAGACACCATGGGGAAGGTGAAGGTCGGAGTCAACGGATTTGGT | |
| | CGTATTGGGCGCCTGGTCACCAGGGCTGCTTTTAACTCTGGTAAAGTGGATATTGTTGCCATCAATGACC | |
| | CCTTCATTGACCTCAACTACATGGTTTACATGTTCCAATATGATTCCACCCATGGCAAATTCCATGGCAC | |
| | CGTCAAGGCTGAGAACGGGAAGCTTGTCATCAATGGAAATCCCATCACCATCTTCCAGGAGCGAGATCCC | |
| | TCCAAAATCAAGTGGGGCGATGCTGGCGCTGAGTACGTCGTGGAGTCCACTGGCGTCTTCACCACCATGG | |
| | AGAAGGCTGGGGCTCATTTGCAGGGGGGAGCCAAAAGGGTCATCATCTCTGCCCCCTCTGCTGATGCCCC | |
| | CATGTTCGTCATGGGTGTGAACCATGAGAAGTATGACAACAGCCTCAAGATCATCAGCAATGCCTCCTGC | |
| | ACCACCAACTGCTTAGCACCCCTGGCCAAGGTCATCCATGACAACTTTGGTATCGTGGAAGGACTCATGA | |
| | CCACAGTCCATGCCATCACTGCCACCCAGAAGACTGTGGATGGCCCCTCCGGGAAACTGTGGCGTGATGG | |
| | CCGCGGGGCTCTCCAGAACATCATCCCTGCCTCTACTGGCGCTGCCAAGGCTGTGGGCAAGGTCATCCCT | |
| | GAGCTGAACGGGAAGCTCACTGGCATGGCCTTCCGTGTCCCCACTGCCAACGTGTCAGTGGTGGACCTGA | |
| | CCTGCCGTCTAGAAAAACCTGCCAAATATGATGACATCAAGAAGGTGGTGAAGCAGGCGTCGGAGGGCCC | |
| | CCTCAAGGGCATCCTGGGCTACACTGAGCACCAGGTGGTCTCCTCTGACTTCAACAGCGACACCCACTCC | |
| | TCCACCTTTGACGCTGGGGCTGGCATTGCCCTCAACGACCACTTTGTCAAGCTCATTTCCTGGTATGACA | |
| | ACGAATTTGGCTACAGCAACAGGGTGGTGGACCTCATGGCCCACATGGCCTCCAAGGAGTAAGACCCCTG | |
| | GACCACCAGCCCCAGCAAGAGCACAAGAGGAAGAGAGAGACCCTCACTGCTGGGGAGTCCCTGCCACACT | |
| | CAGTCCCCCACCACACTGAATCTCCCCTCCTCACAGTTGCCATGTAGACCCCTTGAAGAGGGGAGGGGCC | |
| | TAGGGAGCCGCACCTTGTCATGTACCATCAATAAAGTACCCTGTGCTCAACCAAAAAAAAAAAAAAAAAA | |
| | A | |
| GUSB | GTCCTCAACCAAGATGGCGCGGATGGCTTCAGGCGCATCACGACACCGGCGCGTCACGCGACCCGCCCTA | 3 |
| NM_000181.3 | CGGGCACCTCCCGCGCTTTTCTTAGCGCCGCAGACGGTGGCCGAGCGGGGGACCGGGAAGCATGGCCCGG | |
| | GGGTCGGCGGTTGCCTGGGCGGCGCTCGGGCCGTTGTTGTGGGGCTGCGCGCTGGGGCTGCAGGGCGGGA | |
| | TGCTGTACCCCCAGGAGAGCCCGTCGCGGGAGTGCAAGGAGCTGGACGGCCTCTGGAGCTTCCGCGCCGA | |
| | CTTCTCTGACAACCGACGCCGGGGCTTCGAGGAGCAGTGGTACCGGCGGCCGCTGTGGGAGTCAGGCCCC | |
| | ACCGTGGACATGCCAGTTCCCTCCAGCTTCAATGACATCAGCCAGGACTGGCGTCTGCGGCATTTTGTCG | |
| | GCTGGGTGTGGTACGAACGGGAGGTGATCCTGCCGGAGCGATGGACCCAGGACCTGCGCACAAGAGTGGT | |
| | GCTGAGGATTGGCAGTGCCCATTCCTATGCCATCGTGTGGGTGAATGGGGTCGACACGCTAGAGCATGAG | |
| | GGGGGCTACCTCCCCTTCGAGGCCGACATCAGCAACCTGGTCCAGGTGGGGCCCCTGCCCTCCCGGCTCC | |
| | GAATCACTATCGCCATCAACAACACACTCACCCCCACCACCCTGCCACCAGGGACCATCCAATACCTGAC | |
| | TGACACCTCCAAGTATCCCAAGGGTTACTTTGTCCAGAACACATATTTTGACTTTTTCAACTACGCTGGA | |
| | CTGCAGCGGTCTGTACTTCTGTACACGACACCCACCACCTACATCGATGACATCACCGTCACCACCAGCG | |
| | TGGAGCAAGACAGTGGGCTGGTGAATTACCAGATCTCTGTCAAGGGCAGTAACCTGTTCAAGTTGGAAGT | |
| | GCGTCTTTTGGATGCAGAAAACAAAGTCGTGGCGAATGGGACTGGGACCCAGGGCCAACTTAAGGTGCCA | |
| | GGTGTCAGCCTCTGGTGGCCGTACCTGATGCACGAACGCCCTGCCTATCTGTATTCATTGGAGGTGCAGC | |
| | TGACTGCACAGACGTCACTGGGGCCTGTGTCTGACTTCTACACACTCCCTGTGGGGATCCGCACTGTGGC | |
| | TGTCACCAAGAGCCAGTTCCTCATCAATGGGAAACCTTTCTATTTCCACGGTGTCAACAAGCATGAGGAT | |
| | GCGGACATCCGAGGGAAGGGCTTCGACTGGCCGCTGCTGGTGAAGGACTTCAACCTGCTTCGCTGGCTTG | |
| | GTGCCAACGCTTTCCGTACCAGCCACTACCCCTATGCAGAGGAAGTGATGCAGATGTGTGACCGCTATGG | |
| | GATTGTGGTCATCGATGAGTGTCCCGGCGTGGGCCTGGCGCTGCCGCAGTTCTTCAACAACGTTTCTCTG | |
| | CATCACCACATGCAGGTGATGGAAGAAGTGGTGCGTAGGGACAAGAACCACCCCGCGGTCGTGATGTGGT | |
| | CTGTGGCCAACGAGCCTGCGTCCCACCTAGAATCTGCTGGCTACTACTTGAAGATGGTGATCGCTCACAC | |
| | CAAATCCTTGGACCCCTCCCGGCCTGTGACCTTTGTGAGCAACTCTAACTATGCAGCAGACAAGGGGGCT | |
| | CCGTATGTGGATGTGATCTGTTTGAACAGCTACTACTCTTGGTATCACGACTACGGGCACCTGGAGTTGA | |
| | TTCAGCTGCAGCTGGCCACCCAGTTTGAGAACTGGTATAAGAAGTATCAGAAGCCCATTATTCAGAGCGA | |
| | GTATGGAGCAGAAACGATTGCAGGGTTTCACCAGGATCCACCTCTGATGTTCACTGAAGAGTACCAGAAA | |
| | AGTCTGCTAGAGCAGTACCATCTGGGTCTGGATCAAAAACGCAGAAAATACGTGGTTGGAGAGCTCATTT | |
| | GGAATTTTGCCGATTTCATGACTGAACAGTCACCGACGAGAGTGCTGGGGAATAAAAAGGGGATCTTCAC | |
| | TCGGCAGAGACAACCAAAAAGTGCAGCGTTCCTTTTGCGAGAGAGATACTGGAAGATTGCCAATGAAACC | |
| | AGGTATCCCCACTCAGTAGCCAAGTCACAATGTTTGGAAAACAGCCTGTTTACTTGAGCAAGACTGATAC | |
| | CACCTGCGTGTCCCTTCCTCCCCGAGTCAGGGCGACTTCCACAGCAGCAGAACAAGTGCCTCCTGGACTG | |
| | TTCACGGCAGACCAGAACGTTTCTGGCCTGGGTTTTGTGGTCATCTATTCTAGCAGGGAACACTAAAGGT | |
| | GGAAATAAAAGATTTTCTATTATGGAAATAAAGAGTTGGCATGAAAGTGGCTACTGAAAAAAAAAAAAAA | |
| | AAAAAAAAAAA | |
| RPLP0 | GTCTGACGGGCGATGGCGCAGCCAATAGACAGGAGCGCTATCCGCGGTTTCTGATTGGCTACTTTGTTCG | 4 |
| NM_001002.3 | CATTATAAAAGGCACGCGCGGGCGCGAGGCCCTTCTCTCGCCAGGCGTCCTCGTGGAAGTGACATCGTCT | |
| | TTAAACCCTGCGTGGCAATCCCTGACGCACCGCCGTGATGCCCAGGGAAGACAGGGCGACCTGGAAGTCC | |
| | AACTACTTCCTTAAGATCATCCAACTATTGGATGATTATCCGAAATGTTTCATTGTGGGAGCAGACAATG | |
| | TGGGCTCCAAGCAGATGCAGCAGATCCGCATGTCCCTTCGCGGGAAGGCTGTGGTGCTGATGGGCAAGAA | |
| | CACCATGATGCGCAAGGCCATCCGAGGGCACCTGGAAAACAACCCAGCTCTGGAGAAACTGCTGCCTCAT | |
| | ATCCGGGGGAATGTGGGCTTTGTGTTCACCAAGGAGGACCTCACTGAGATCAGGGACATGTTGCTGGCCA | |
| | ATAAGGTGCCAGCTGCTGCCCGTGCTGGTGCCATTGCCCCATGTGAAGTCACTGTGCCAGCCCAGAACAC | |
| | TGGTCTCGGGCCCGAGAAGACCTCCTTTTTCCAGGCTTTAGGTATCACCACTAAAATCTCCAGGGGCACC | |
| | ATTGAAATCCTGAGTGATGTGCAGCTGATCAAGACTGGAGACAAAGTGGGAGCCAGCGAAGCCACGCTGC | |
| | TGAACATGCTCAACATCTCCCCCTTCTCCTTTGGGCTGGTCATCCAGCAGGTGTTCGACAATGGCAGCAT | |
| | CTACAACCCTGAAGTGCTTGATATCACAGAGGAAACTCTGCATTCTCGCTTCCTGGAGGGTGTCCGCAAT | |
| | GTTGCCAGTGTCTGTCTGCAGATTGGCTACCCAACTGTTGCATCAGTACCCCATTCTATCATCAACGGGT | |
| | ACAAACGAGTCCTGGCCTTGTCTGTGGAGACGGATTACACCTTCCCACTTGCTGAAAAGGTCAAGGCCTT | |
| | CTTGGCTGATCCATCTGCCTTTGTGGCTGCTGCCCCTGTGGCTGCTGCCACCACAGCTGCTCCTGCTGCT | |
| | GCTGCAGCCCCAGCTAAGGTTGAAGCCAAGGAAGAGTCGGAGGAGTCGGACGAGGATATGGGATTTGGTC | |
| | TCTTTGACTAATCACCAAAAAGCAACCAACTTAGCCAGTTTTATTTGCAAAACAAGGAAATAAAGGCTTA | |
| | CTTCTTTAAAAAGTAAAAAAAAAAAAAAAAAAAAAAAAA | |
| TFRC | AGAGCGTCGGGATATCGGGTGGCGGCTCGGGACGGAGGACGCGCTAGTGTGAGTGCGGGCTTCTAGAACT | 5 |
| NM_003234.2 | ACACCGACCCTCGTGTCCTCCCTTCATCCTGCGGGGCTGGCTGGAGCGGCCGCTCCGGTGCTGTCCAGCA | |
| | GCCATAGGGAGCCGCACGGGGAGCGGGAAAGCGGTCGCGGCCCCAGGCGGGGCGGCCGGGATGGAGCGGG | |
| | GCCGCGAGCCTGTGGGGAAGGGGCTGTGGCGGCGCCTCGAGCGGCTGCAGGTTCTTCTGTGTGGCAGTTC | |
| | AGAATGATGGATCAAGCTAGATCAGCATTCTCTAACTTGTTTGGTGGAGAACCATTGTCATATACCCGGT | |
| | TCAGCCTGGCTCGGCAAGTAGATGGCGATAACAGTCATGTGGAGATGAAACTTGCTGTAGATGAAGAAGA | |
| | AAATGCTGACAATAACACAAAGGCCAATGTCACAAAACCAAAAAGGTGTAGTGGAAGTATCTGCTATGGG | |
| | ACTATTGCTGTGATCGTCTTTTTCTTGATTGGATTTATGATTGGCTACTTGGGCTATTGTAAAGGGGTAG | |
| | AACCAAAAACTGAGTGTGAGAGACTGGCAGGAACCGAGTCTCCAGTGAGGGAGGAGCCAGGAGAGGACTT | |
| | CCCTGCAGCACGTCGCTTATATTGGGATGACCTGAAGAGAAAGTTGTCGGAGAAACTGGACAGCACAGAC | |
| | TTCACCGGCACCATCAAGCTGCTGAATGAAAATTCATATGTCCCTCGTGAGGCTGGATCTCAAAAAGATG | |
| | AAAATCTTGCGTTGTATGTTGAAAATCAATTTCGTGAATTTAAACTCAGCAAAGTCTGGCGTGATCAACA | |
| | TTTTGTTAAGATTCAGGTCAAAGACAGCGCTCAAAACTCGGTGATCATAGTTGATAAGAACGGTAGACTT | |
| | GTTTACCTGGTGGAGAATCCTGGGGGTTATGTGGCGTATAGTAAGGCTGCAACAGTTACTGGTAAACTGG | |
| | TCCATGCTAATTTTGGTACTAAAAAAGATTTTGAGGATTTATACACTCCTGTGAATGGATCTATAGTGAT | |
| | TGTCAGAGCAGGGAAAATCACCTTTGCAGAAAAGGTTGCAAATGCTGAAAGCTTAAATGCAATTGGTGTG | |
| | TTGATATACATGGACCAGACTAAATTTCCCATTGTTAACGCAGAACTTTCATTCTTTGGACATGCTCATC | |
| | TGGGGACAGGTGACCCTTACACACCTGGATTCCCTTCCTTCAATCACACTCAGTTTCCACCATCTCGGTC | |
| | ATCAGGATTGCCTAATATACCTGTCCAGACAATCTCCAGAGCTGCTGCAGAAAAGCTGTTTGGGAATATG | |
| | GAAGGAGACTGTCCCTCTGACTGGAAAACAGACTCTACATGTAGGATGGTAACCTCAGAAAGCAAGAATG | |
| | TGAAGCTCACTGTGAGCAATGTGCTGAAAGAGATAAAAATTCTTAACATCTTTGGAGTTATTAAAGGCTT | |
| | TGTAGAACCAGATCACTATGTTGTAGTTGGGGCCCAGAGAGATGCATGGGGCCCTGGAGCTGCAAAATCC | |
| | GGTGTAGGCACAGCTCTCCTATTGAAACTTGCCCAGATGTTCTCAGATATGGTCTTAAAAGATGGGTTTC | |
| | AGCCCAGCAGAAGCATTATCTTTGCCAGTTGGAGTGCTGGAGACTTTGGATCGGTTGGTGCCACTGAATG | |
| | GCTAGAGGGATACCTTTCGTCCCTGCATTTAAAGGCTTTCACTTATATTAATCTGGATAAAGCGGTTCTT | |
| | GGTACCAGCAACTTCAAGGTTTCTGCCAGCCCACTGTTGTATACGCTTATTGAGAAAACAATGCAAAATG | |
| | TGAAGCATCCGGTTACTGGGCAATTTCTATATCAGGACAGCAACTGGGCCAGCAAAGTTGAGAAACTCAC | |
| | TTTAGACAATGCTGCTTTCCCTTTCCTTGCATATTCTGGAATCCCAGCAGTTTCTTTCTGTTTTTGCGAG | |
| | GACACAGATTATCCTTATTTGGGTACCACCATGGACACCTATAAGGAACTGATTGAGAGGATTCCTGAGT | |
| | TGAACAAAGTGGCACGAGCAGCTGCAGAGGTCGCTGGTCAGTTCGTGATTAAACTAACCCATGATGTTGA | |
| | ATTGAACCTGGACTATGAGAGGTACAACAGCCAACTGCTTTCATTTGTGAGGGATCTGAACCAATACAGA | |
| | GCAGACATAAAGGAAATGGGCCTGAGTTTACAGTGGCTGTATTCTGCTCGTGGAGACTTCTTCCGTGCTA | |
| | CTTCCAGACTAACAACAGATTTCGGGAATGCTGAGAAAACAGACAGATTTGTCATGAAGAAACTCAATGA | |
| | TCGTGTCATGAGAGTGGAGTATCACTTCCTCTCTCCCTACGTATCTCCAAAAGAGTCTCCTTTCCGACAT | |
| | GTCTTCTGGGGCTCCGGCTCTCACACGCTGCCAGCTTTACTGGAGAACTTGAAACTGCGTAAACAAAATA | |
| | ACGGTGCTTTTAATGAAACGCTGTTCAGAAACCAGTTGGCTCTAGCTACTTGGACTATTCAGGGAGCTGC | |
| | AAATGCCCTCTCTGGTGACGTTTGGGACATTGACAATGAGTTTTAAATGTGATACCCATAGCTTCCATGA | |
| | GAACAGCAGGGTAGTCTGGTTTCTAGACTTGTGCTGATCGTGCTAAATTTTCAGTAGGGCTACAAAACCT | |
| | GATGTTAAAATTCCATCCCATCATCTTGGTACTACTAGATGTCTTTAGGCAGCAGCTTTTAATACAGGGT | |
| | AGATAACCTGTACTTCAAGTTAAAGTGAATAACCACTTAAAAAATGTCCATGATGGAATATTCCCCTATC | |
| | TCTAGAATTTTAAGTGCTTTGTAATGGGAACTGCCTCTTTCCTGTTGTTGTTAATGAAAATGTCAGAAAC | |
| | CAGTTATGTGAATGATCTCTCTGAATCCTAAGGGCTGGTCTCTGCTGAAGGTTGTAAGTGGTCGCTTACT | |
| | TTGAGTGATCCTCCAACTTCATTTGATGCTAAATAGGAGATACCAGGTTGAAAGACCTTCTCCAAATGAG | |
| | ATCTAAGCCTTTCCATAAGGAATGTAGCTGGTTTCCTCATTCCTGAAAGAAACAGTTAACTTTCAGAAGA | |
| | GATGGGCTTGTTTTCTTGCCAATGAGGTCTGAAATGGAGGTCCTTCTGCTGGATAAAATGAGGTTCAACT | |
| | GTTGATTGCAGGAATAAGGCCTTAATATGTTAACCTCAGTGTCATTTATGAAAAGAGGGGACCAGAAGCC | |
| | AAAGACTTAGTATATTTTCTTTTCCTCTGTCCCTTCCCCCATAAGCCTCCATTTAGTTCTTTGTTATTTT | |
| | TGTTTCTTCCAAAGCACATTGAAAGAGAACCAGTTTCAGGTGTTTAGTTGCAGACTCAGTTTGTCAGACT | |
| | TTAAAGAATAATATGCTGCCAAATTTTGGCCAAAGTGTTAATCTTAGGGGAGAGCTTTCTGTCCTTTTGG | |
| | CACTGAGATATTTATTGTTTATTTATCAGTGACAGAGTTCACTATAAATGGTGTTTTTTTAATAGAATAT | |
| | AATTATCGGAAGCAGTGCCTTCCATAATTATGACAGTTATACTGTCGGTTTTTTTTAAATAAAAGCAGCA | |
| | TCTGCTAATAAAACCCAACAGATACTGGAAGTTTTGCATTTATGGTCAACACTTAAGGGTTTTAGAAAAC | |
| | AGCCGTCAGCCAAATGTAATTGAATAAAGTTGAAGCTAAGATTTAGAGATGAATTAAATTTAATTAGGGG | |
| | TTGCTAAGAAGCGAGCACTGACCAGATAAGAATGCTGGTTTTCCTAAATGCAGTGAATTGTGACCAAGTT | |
| | ATAAATCAATGTCACTTAAAGGCTGTGGTAGTACTCCTGCAAAATTTTATAGCTCAGTTTATCCAAGGTG | |
| | TAACTCTAATTCCCATTTTGCAAAATTTCCAGTACCTTTGTCACAATCCTAACACATTATCGGGAGCAGT | |
| | GTCTTCCATAATGTATAAAGAACAAGGTAGTTTTTACCTACCACAGTGTCTGTATCGGAGACAGTGATCT | |
| | CCATATGTTACACTAAGGGTGTAAGTAATTATCGGGAACAGTGTTTCCCATAATTTTCTTCATGCAATGA | |
| | CATCTTCAAAGCTTGAAGATCGTTAGTATCTAACATGTATCCCAACTCCTATAATTCCCTATCTTTTAGT | |
| | TTTAGTTGCAGAAACATTTTGTGGTCATTAAGCATTGGGTGGGTAAATTCAACCACTGTAAAATGAAATT | |
| | ACTACAAAATTTGAAATTTAGCTTGGGTTTTTGTTACCTTTATGGTTTCTCCAGGTCCTCTACTTAATGA | |
| | GATAGTAGCATACATTTATAATGTTTGCTATTGACAAGTCATTTTAACTTTATCACATTATTTGCATGTT | |
| | ACCTCCTATAAACTTAGTGCGGACAAGTTTTAATCCAGAATTGACCTTTTGACTTAAAGCAGAGGGACTT | |
| | TGTATAGAAGGTTTGGGGGCTGTGGGGAAGGAGAGTCCCCTGAAGGTCTGACACGTCTGCCTACCCATTC | |
| | GTGGTGATCAATTAAATGTAGGTATGAATAAGTTCGAAGCTCCGTGAGTGAACCATCATTATAAACGTGA | |
| | TGATCAGCTGTTTGTCATAGGGCAGTTGGAAACGGCCTCCTAGGGAAAAGTTCATAGGGTCTCTTCAGGT | |
| | TCTTAGTGTCACTTACCTAGATTTACAGCCTCACTTGAATGTGTCACTACTCACAGTCTCTTTAATCTTC | |
| | AGTTTTATCTTTAATCTCCTCTTTTATCTTGGACTGACATTTAGCGTAGCTAAGTGAAAAGGTCATAGCT | |
| | GAGATTCCTGGTTCGGGTGTTACGCACACGTACTTAAATGAAAGCATGTGGCATGTTCATCGTATAACAC | |
| | AATATGAATACAGGGCATGCATTTTGCAGCAGTGAGTCTCTTCAGAAAACCCTTTTCTACAGTTAGGGTT | |
| | GAGTTACTTCCTATCAAGCCAGTACGTGCTAACAGGCTCAATATTCCTGAATGAAATATCAGACTAGTGA | |
| | CAAGCTCCTGGTCTTGAGATGTCTTCTCGTTAAGGAGATGGGCCTTTTGGAGGTAAAGGATAAAATGAAT | |
| | GAGTTCTGTCATGATTCACTATTCTAGAACTTGCATGACCTTTACTGTGTTAGCTCTTTGAATGTTCTTG | |
| | AAATTTTAGACTTTCTTTGTAAACAAATGATATGTCCTTATCATTGTATAAAAGCTGTTATGTGCAACAG | |
| | TGTGGAGATTCCTTGTCTGATTTAATAAAATACTTAAACACTGAAAAAAAAAAAAAAAAAA | |
| MRPL19 | GTAGTCTTGACGTGAGCTAGCTGGCATGGCGGCCTGCATTGCAGCGGGGCACTGGGCTGCAATGGGCCTA | 6 |
| NM_014763.3 | GGCCGGAGTTTCCAAGCCGCCAGGACTCTGCTCCCCCCGCCGGCCTCTATCGCCTGCAGGGTCCACGCGG | |
| | GGCCTGTCCGGCAGCAGAGCACTGGGCCTTCCGAGCCCGGTGCGTTCCAACCGCCGCCGAAACCGGTCAT | |
| | CGTGGACAAGCACCGCCCCGTGGAACCGGAACGCAGGTTCTTGAGTCCTGAATTCATTCCTCGAAGGGGA | |
| | AGAACAGATCCTCTGAAATTTCAAATAGAAAGAAAAGATATGTTAGAAAGGAGAAAAGTACTCCACATTC | |
| | CAGAGTTCTATGTTGGAAGTATTCTTCGTGTTACTACAGCTGACCCATATGCCAGTGGAAAAATCAGCCA | |
| | GTTTCTGGGGATTTGCATTCAGAGATCAGGAAGAGGACTTGGAGCTACTTTCATCCTTAGGAATGTTATC | |
| | GAAGGACAAGGTGTCGAGATTTGCTTTGAACTTTATAATCCTCGGGTCCAGGAGATTCAGGTGGTCAAAT | |
| | TAGAGAAACGGCTGGATGATAGCTTGCTATACTTACGAGATGCCCTTCCTGAATATAGCACTTTTGATGT | |
| | GAATATGAAGCCAGTAGTACAAGAGCCTAACCAAAAAGTTCCTGTTAATGAGCTGAAAGTAAAAATGAAG | |
| | CCTAAGCCCTGGTCTAAACGCTGGGAACGTCCAAATTTTAATATTAAAGGAATCAGATTTGATCTTTGTT | |
| | TAACTGAACAGCAAATGAAAGAAGCTCAGAAGTGGAATCAGCCATGGCTTGAATTTGATATGATGAGGGA | |
| | ATATGATACTTCAAAAATTGAAGCTGCAATATGGAAGGAAATTGAAGCGTCGAAAAGGTCTTGATTCTGA | |
| | GAATGAATTTGGTTAGTTGCAGAAGATACATTGGCTCTAAGAGGATATATTTTGAGACCAATTTAATTTC | |
| | ATTTATAAGAACATAGTAATTAAGTGAACTAAGCATTCATTGTTTTATTAATACTTTTTTTCTAAAATAA | |
| | AACTTGTACACCAGTTTATTACTCTAAAAAGAGAATTACACATGCCAAATGGACCAATGTCCATTTGCTT | |
| | ATTGGAGGCAAAGCTACAATAGAAGTCAGAGCATCACCAGAATGGTCTTTAATGAGCATGGAACCTGAGC | |
| | AAAGGGAATAGGTGGGATGAATTTTTTTTTTAATTGTGAAACAATTCATAAGCACAATATGATTTACAGA | |
| | ATAATAAACATTCATGTACCCACTATCAGGTTAAGAAATAGAACATTTATTAATATGTAGGAATGTTAAG | |
| | AAATAAAACATTTAATAAGATCTCAGAAGACTCCAGTAAATCTGCAATTGTATCTCTCTCCTTTTTAAAT | |
| | GTAAATATCATCTTGACTTGTTAATTATTCCCTTGCATTTCTTTTAGTTTACTGCCAACACATATATTCT | |
| | TCAACAATATATTTAATTTTGAAAAACCTGAAAAAAAAAACCTGTTAGCAAGTATAAAGGGGCAGTATTA | |
| | CTATTATTGCATGAAGGCTTCAAGGGAAACGTTACAGTCTTTGGGTCATAGTCTGGCTTCAGCTTCCTCT | |
| | GAGAGTTTACAGAGGCCAATTTTGAGCAAATTCATGGCTAAGGTTATGAGTGAGTTCTGCTAAACAGAAG | |
| | GCTCACCACAAGGTATCTGGCAGGATTATACTGGGTAGCTGGATGTTGCAGAAATGTGGTTAGAGGAAGT | |
| | AAACTGTTTTTTGATGCTCACAGCATGATGAATCAAACTCTGTATCTTAGGATTAGGTTAAAACAATACC | |
| | TTTGGTATGATATGAGTGTTGTTGCTGATCCATGCAGCATGGATTGGAAAGCTGGGGTATAAGCACACAT | |
| | GCTAAAGAAAAACATGTAATTTGGTCCATACTCACCTGGATATACTGTTCCTCAGGTTAAAAAATACAGT | |
| | ACTATCCTAAATCTTGAAGGCAACTCTCAGCCTATCCATTGAGTTACCTTCAGATCTGCCCTCTGGTTCC | |
| | TAGCTGTCTTGGGACTAACTTCTTTCCTGCGCTCAGCTGTTTTCTGGATTCCATGTTTTCCATTTTATTG | |
| | AGTACTAACTTGTTTTGCTGCAGCACATCCTTTGGTAGCTTCTAGAGGAAGTTTGTGTGGAGGTAAAATT | |
| | TTTGAGACCTTGCATGTCTCATGTTTGATTGATACTTTATACGTTTAGGTAGGAGGTAATTTTCCTTCAG | |
| | GACTTTAAAAATATTGTTGCTCCATTTTCTTTGTTTCTATTGTTGTATTGAGAAATCCAATGCCATTTTG | |
| | ATTTCCCCATCATAAATTTCATGATGATGTGTCTTGGTGTGGGTCTATATTTATCCATTGTATTGGGTTT | |
| | TAGGTGAACCCTTCCAGATAGTAACTCATTTCTGTCAGTTCTGGGAAACACTTAGCATTGGTTGATGATT | |
| | TATTCTCTGCTGCTTTGTTCTCCCAACTATTATTTGGATGTTGGATATCCAGCACTGGGTATCTATTTTC | |
| | TTACCTCCCTCCCTTGACCCCAGTCTCTGTTTTTTAGCTCTTTAGCTCAATCTTCCAACTCTTTGCTATT | |
| | GTATTTTAAAATCTTAAGACCCCTTCTTGATTTGTAGAAGTTCCTTTTCTTACAACCAAAAAGCCTTTAT | |
| | CTATGGATTTGTTCACAGATAAGGGGTATTCAATATAGTGTATTTTTTTTTCATTTAAAATTGTTTGCGC | |
| | ATCTATTTCCTCCAAATTTCTTTCTGTATTTATTTTTTGTTGTCTATATTTCAGACTTTTCCAGGATATC | |
| | TGATAATCTTTGGCTGTCTTCTTATGGTTGAAAGAGGGACTAAAAAGCTTGGAAAGCCTTTGGGTTGTGG | |
| | GAAGGGGCTGTCTTTAGGATTATCTGAATGGGCTTTTTTGGGAGTCCCCTCCTCCACATGAATATTTTGG | |
| | TTTTGTCAGATTCCCTAGAATAGAGGCTTCCAATCTCCTTCCTGGAGGGGTCTGTCCAGGAAGGAGATTG | |
| | TCTAGGGGTCTGTCAGACAGCAGCTTTCAGCTACTTCCTTGATCTTTTTCACTAATGATTATATAGTCAT | |
| | CTAACTACTGTCAACAAGTAATAGATATCCTATCCTTCACTTGTTTAGATTATTTGCTGAGATAACCTCT | |
| | CAAAAGAACCTCTCAAAATAAAAGGTTAACAAGAGCCTATATCTTATATTTTTCTTCTCTTTATCTTGTT | |
| | AGAAGATAGCTATTAAAACCTGTTCTTTTTCTGTCTTGATAAACACACTTCAATCTTGGTAGAATGGTAG | |
| | ATGGGACAGTATATTTTAGGACCTAAAGCTCTGCAAATGTATGATCAGCTTGTAAGTACAGGTGCTCAAA | |
| | AACATGTAAACAATCATGCTTTTTACTCTGTAGGAATATCTTTAAAATTCTTGTGAATTTTTCCCCAGAA | |
| | GTAAAGCAAATCTTCCCCCAGAAATAAAATTAAATGTGCATAATCTAAAGCTTTTTTTTTTTATTGTGGT | |
| | AGGATATATATATAAAACATAATTTGCCATTGTAAACATTTTAAATTTACAAGTCAGAGGCATTAATTAC | |
| | ATCACAATGTTGTGAAATTATTACTACTATTTCCAAAATTTTCTCATCACCCCAAACTGAAACTCTGTAA | |
| | CTGTTGAGCAATAACCTCATTCCTGTATCTCTCCCAACCCCAGGTAACCTCAAATCTTTCTTTTTATCTT | |
| | TGAGACAAGGTCTCATTCTATCACTCAGGTAGGAGTGCAGTGGTGTGATCATAGCTCATTGCAGCCTCAA | |
| | AATCCTGGGCTCAAGCAATCCTCCTTGAGTAGCTAAGACTATAGGCACACATTAACTGCGCCTGGCTGAT | |
| | TTTGTTTTTTGTAGAGATGTGGTCTTGCTATGTTTCCCATGCTGGTCTTGAGTTCCTGGCCTCAAGCAGT | |
| | CCTTAAGATTCATCCATGTTGTGGCATGTGTCAGAATTTCATTTGTTTTTATGACTAAATAATATTCCAT | |
| | TGTATGTATATACATTTTGTTCATCCATCTTCTGATGAACACTGGGATATGTCTACCTTTTGGCTATTGT | |
| | GAATAATGCTGCAGTAAACATTGACATAACAAGTATGTATTTGATTGCCTGTTTCTAAGTTCTTTTGGGT | |
| | ATACATCTTGAGTAGAATTGCTAGATAATGTCATGTTTTATTTCTCTTGTGATTTCTTCTTCGATCCCCT | |
| | GGTTGAGTGTGTTAATTTCTACATGTTTATGAATTTCCCACTGTTTTTTTGTTATTGATTTCCAAGTTCA | |
| | TTCCATTGTGATTAGAGAAGATACTTAGTATGATTTTAATGTTTTTGAGAATTGGTGTGTGGCCTGATAG | |
| | ATGGTCTGTCCTGGAGAATGTTCCTCATACACTTGAGCAAAATATTTATCATGCTATTGTTGACTGTAGT | |
| | TTTCTATATGTCTCTTAGGTCAAGGTGGTTTACAATGTGTTAAGGTTCTCTTTTTTTAAAAAAATTTTTG | |
| | CACAGAGTATCTTTTTCTATGTGTTCCATGTATTTGTGTCTTTGGAGCTATAGTCTCTTGTAGACAGCAT | |
| | ATCACTATCTTGTTTTGTTTTGTTTTTTCTGTCCATTCTGCCAATTTCTGCCTTTTGATTGGAAAATTTA | |
| | ATCCATTTGCATTTAAAGTAATTAAGGAAGGACTTTCTTCTACCATTTAACACTTCTTCTATATGTCATA | |
| | TACTTTTTTGGCCCCTCATTTCCTCTTTATGGCCTTCTTTTCTGTTTTTTTGTAGTGAACTAGTCTGATT | |
| | CTCTTTCCACTCCCCTTTGTGTATATTTGTTAGATGTTTTATTTGTGGTTGCTATGGGGATTATAGTTAA | |
| | CATCCTACACTTAAAACAATCTAATTTAAACTGATACCAATTTACCTTCAATAGCATACAAAATCTCTAC | |
| | TCCTGTAAAGCTCTGCCCCTGCCCCCCTTATGTTATTGATGGCACAAATTGCCTAATAAATAATTTATAG | |
| | TTATTTGTATGAGTTTGTCTTTTAAATCATTTAGGAAATAAAAAGTGGAGTTAGAAAACAGTATGATAGT | |
| | AATACTGACTTTTATATTTGTCAATATATTTATCTTATTTTGGATCCTTATTTCATTATATAGATTTGAG | |
| | TTACTGTCTAGTGCCCTTCCATTTCGGCCCAAAGGATTCCCTTATGCATTTCTTGCAGGGCAAGTCTAAT | |
| | TGTAATAAACTCCCTCAGCTTTTGTTTTATCTGAGAATGTCTTGATTTCTCCCTTATTTTTGATGGATAA | |
| | TTTTGCCAGATACATGAATTTTTGGTAACAGTATTTTTCTTTCAGCACTTTAAATATGTCATCCCACTAC | |
| | CTTCTGACTTCATGGTTTCTCATGAGATATTAGATGTTATAAAATTTGAGGATTCCTCATTCTTGATGAG | |
| | TCAGTTCTGTCTTATTGCTTTTCGGATTTGCTCAGCTTTTGTCTTTTGACAGTTTGATTATAACGCGGCT | |
| | CAGTGTGGGTCTCTGAGTTTATCCCACTTAGAGTTTGTTGAGTTTCTTGGAGTCATAGATTTATGTCTTT | |
| | TATCAAATTTTGGACATATTTGGCTATTATTTCTTCAATTTTTTTCACTGCTTCTTTCTTTTCCTTCTGA | |
| | AATATTCTTAATGTATATGTTGGTCTGTTTGATGCTGTCTCACCAGTTTCTTAGGCTGTGTTCTCTTTTG | |
| | TTCCTCAGACTTGATTATTGCAGTTGCCCTTCTTTTTATTTTTTTCAAGTTTGTTGATTCTTCTCCCTGT | |
| | TCAGATCAACTGTTGAACTCCTCTAGTGAATTTATTTCAGTTACTGTACTTTTCAGCTCCAAGATTTATC | |
| | TTTGGTTCCTTTTTATAACGTCTGTGTCTTTATTGATATTCTCATTTTGTTCATATGTCTCTTTCTTCCT | |
| | TTAGTTCTTTGTCCATGTTTTCCTTTAGCTCTTTGGGCTTATTTAAGACAATTGTTTAAAGTCTTTGCAT | |
| | AGTAAGTCCAATGTCTGTGTTTCTTCAGGGATGGTTTTCATTATTTTGTTTTCAATGAGCCATACTTTCC | |
| | TGTGTCTTTGTATGCTGTCTTTTTGTTGTTGAAAACTGTATGTTTGAACATCATAACGTGGTGGCCCTGA | |
| | AAATCAGATATTCCCCCCTTCCTGAGAGTTAGTTTTATTTTTATTATTGAAGATTGTAGCAGTCTATTGC | |
| | TACATGTGCAGTCATTTCCAAACTATTTTTGCAAAGACTGTATTCCTTCTGTGTGTCATCACTGAAGTCT | |
| | CTGTTCCTTAGTTTGTGTTTAATAGTTTGACATAGATTTCCTTGAAAGGAGTTAAAACTAGCAGAAAAAT | |
| | CTCTCTCCCAGTCTTTCCAGTCTTTGTAGATTGGTTCTGTGCTGGGCTTTTCCATTAATACTTAGCCAGG | |
| | CTTGTACTGAGCCTAACAATCAGGCCCAAAAGCGTAGGGTCTTTGCAGATCTTGTCTGAGCATGCTTCTT | |
| | GCTGTGTATGCACGTAGTTTTCTAAATCTCCCTGTATGTGCTGTTGAATATTCTAATTTCCCAAAGAAAC | |
| | TCCTTTGCAGCTTTTTCTCACAGAACATAGATGGTTTTTTGGATATCTTGACCATAGTCTTTCGACCCAG | |
| | GTGTTTGCGGTTGTTAGTTCACCTTACACTTTTTTCAAGCATTGCCTACTGCTTACGATGAGTGCTCTGT | |
| | CAATCCTTTAAGTAGCCCCAGACAGGCTACCAGAGACTTAAACAAGAATTTGTAAGTTCTGCTCAGCTTC | |
| | CTCTAGAAATGGGGATCAGGGTCCAAGACAGAATGCAGTTGCTGATTTCAAGACTGCTGCAACACCAGGG | |
| | AGCTTGTGGGGGAAGGGCAAGCAGAAATGTCACAAAGCTTTCTTGCCATTTTAAAGTTGCCTGTTCTTGA | |
| | CTCAGCATTTGCTTCATTGCTATAAACTTTTTACTGTTTTTCAGAGTTCTGATAAAATTGGCTATGCCTG | |
| | TTCCTGCTTTAAAAAATATATATATATTTTTTAGGGATTGGGGTCTCACTATACTGACCAGGCTGGTCTT | |
| | GAACTTCTGGCCTCAAGCCATCCTCTCATTTCAGCTTCCCAAAGTGCTGCAATTACACGCGTGAACCACC | |
| | ACACCCAGCCCCTGCTTGTTTTTCAATGTGCCTACTCCACCATGTTGCTCAAGTATGTATATTTTCTAAA | |
| | CTACCTTGTAGTGTTGTGATGGGAAATAAATCCCTGAGCCTTTTGAATAACTCAGAGAGATCAAAAACTT | |
| | AGTTTATCCTATTCGAAGGATTAGAAAAATGATATATCTTTCACTTTTTCAGGGATAGGCTCCTCATTAG | |
| | AAGGCTCCTATGTGCCGATGCTGTACAAGACATTTCATTTCTCTTAATGTTTACAACAAGCTTGTTGCCA | |
| | AGGCTGATCTTGAACTCCTGGCCTCAAACGATCCTCCCAGCTCAGTCTCACAAAGTGTTGGGATGTCTGG | |
| | CCAACTAATGACTATCTTAACTCTTGTGTTTCAATGTTTATGCCTTCTTTTATCTTGACTGATTGTATGA | |
| | CTATGTCTTCTAGAACAATGTTGAACAGAAATGGTGAGAGCAGACATCCTTGCTTTAATATTTCACCATT | |
| | ATATATGATGTTAGGTATAGATTTTTCTCACAGATGCCTTTTATCAGATTGAGGAATTTATATTCCTACT | |
| | TTGCCGAAAGGTTTTTGTAGTATGAGGGGGTGCTGAATTTTGTCAAACACTTTTTCGGTAATAATTGAGA | |
| | TGATTGGTTCTGCAGTCATCGAGATGTGGATTTTCTCCTTTATTCTGTTCGTGAGTGATTACACTGGTTG | |
| | ACTAATGTTAAAACAACCTTACTTTCCAGGAATAAACCCTATTATCTTTTTTATACA | |
| PSMC4 | TGCGGGTACGGACAGCGCATGAGCTTATGTTGAGGGCGGAGCCCAGACCAGCCCTTCGTCCTATCCTGCC | 7 |
| NM_006503.3 | CTTCCAGCACCTCTCAGCCGTAACTTAAACTACACTTCCCAGAAGCCTCCTCAGCCAGGGACTTCCGTTG | |
| | TCGTCAGCGGAAGCGGTGACAGATCATCCCAGGCCACACAGAGGCCGGCTTGGTCACTATGGAGGAGATA | |
| | GGCATCTTGGTGGAGAAGGCTCAGGATGAGATCCCAGCACTGTCCGTGTCCCGGCCCCAGACCGGCCTGT | |
| | CCTTCCTGGGCCCTGAGCCTGAGGACCTGGAGGACCTGTACAGCCGCTACAAGAAGCTGCAGCAAGAGCT | |
| | GGAGTTCCTGGAGGTGCAGGAGGAATACATCAAAGATGAGCAAAAGAACCTGAAAAAGGAATTTCTCCAT | |
| | GCCCAGGAGGAGGTGAAGCGAATCCAAAGCATCCCGCTGGTCATCGGACAATTTCTGGAGGCTGTGGATC | |
| | AGAATACAGCCATCGTGGGCTCTACCACAGGCTCCAACTATTATGTGCGCATCCTGAGCACCATCGATCG | |
| | GGAGCTGCTCAAGCCCAACGCCTCAGTGGCCCTCCACAAGCACAGCAATGCACTGGTGGACGTGCTGCCC | |
| | CCCGAAGCCGACAGCAGCATCATGATGCTCACCTCAGACCAGAAGCCAGATGTGATGTACGCGGACATCG | |
| | GAGGCATGGACATCCAGAAGCAGGAGGTGCGGGAGGCCGTGGAGCTCCCGCTCACGCATTTCGAGCTCTA | |
| | CAAGCAGATCGGCATCGATCCCCCCCGAGGCGTCCTCATGTATGGCCCACCTGGCTGTGGGAAGACCATG | |
| | TTGGCAAAGGCGGTGGCACATCACACAACAGCTGCATTCATCCGGGTCGTGGGCTCGGAGTTTGTACAGA | |
| | AGTATCTGGGTGAGGGCCCCCGCATGGTCCGGGATGTGTTCCGCCTGGCCAAGGAGAATGCACCTGCCAT | |
| | CATCTTCATAGACGAGATTGATGCCATCGCCACCAAGAGATTCGATGCTCAGACAGGGGCCGACAGGGAG | |
| | GTTCAGAGGATCCTGCTGGAGCTGCTGAATCAGATGGATGGATTTGATCAGAATGTCAATGTCAAGGTAA | |
| | TCATGGCCACAAACAGAGCAGACACCCTGGATCCGGCCCTGCTACGGCCAGGACGGCTGGACCGTAAAAT | |
| | TGAATTTCCACTTCCTGACCGCCGCCAGAAGAGATTGATTTTCTCCACTATCACTAGCAAGATGAACCTC | |
| | TCTGAGGAGGTTGACTTGGAAGACTATGTGGCCCGGCCAGATAAGATTTCAGGAGCTGATATTAACTCCA | |
| | TCTGTCAGGAGAGTGGAATGTTGGCTGTCCGTGAAAACCGCTACATTGTCCTGGCCAAGGACTTCGAGAA | |
| | AGCATACAAGACTGTCATCAAGAAGGACGAGCAGGAGCATGAGTTTTACAAGTGACCCTTCCCTTCCCTC | |
| | CACCACACCACTCAGGGGCTGGGGCTTCTCTCGCACCCCCAGCACCTCTGTCCCAAAACCTCATTCCCTT | |
| | TTTTCTTTACCCAGGATTGGTTTCTTCAATAAATAGATAAGATCGAATCCATTTAATTTCTTCTTAGAAG | |
| | TTTAACTCCTTTGGAGAATGTGGGCCTTGAATAGGATCCTCTGGGTCCCTCTTAATCTGACAGATGAGCA | |
| | GACGAGGTGCATGGCCTGGGTTGCAGCTTGAGAGAACCAAAATATTCAAACCAGATGACTTCCAAAATGT | |
| | GGGGAAAGGGATGGAAAATGAACCTGAGATGGAGTCCTTAATCACGGGATAAAGCCCTGTGCATCTCCCT | |
| | CATTTCCTACAGGTAAAAGACAGTAAAGAAATTCAGGTCACAGGCCTTGGGAGTTCATAGGAAGGAGATG | |
| | TCCAGTGCTGTCCAGTAGAACTTT | |
| PUM1 | AGTGGGCCGCCATGTTGTCGGAGTGAAAGGTAAGGGGGAGCGAGAGCGCCAGAGAGAGAAGATCGGGGGG | 8 |
| NM_001020658.1 | CTGAAATCCATCTTCATCCTACCGCTCCGCCCGTGTTGGTGGAATGAGCGTTGCATGTGTCTTGAAGAGA | |
| | AAAGCAGTGCTTTGGCAGGACTCTTTCAGCCCCCACCTGAAACATCACCCTCAAGAACCAGCTAATCCCA | |
| | ACATGCCTGTTGTTTTGACATCTGGAACAGGGTCGCAAGCGCAGCCACAACCAGCTGCAAATCAGGCTCT | |
| | TGCAGCTGGGACTCACTCCAGCCCTGTCCCAGGATCTATAGGAGTTGCAGGCCGTTCCCAGGACGACGCT | |
| | ATGGTGGACTACTTCTTTCAGAGGCAGCATGGTGAGCAGCTTGGGGGAGGAGGAAGTGGAGGAGGCGGCT | |
| | ATAATAATAGCAAACATCGATGGCCTACTGGGGATAACATTCATGCAGAACATCAGGTGCGTTCCATGGA | |
| | TGAACTGAATCATGATTTTCAAGCACTTGCTCTGGAGGGAAGAGCGATGGGAGAGCAGCTCTTGCCAGGT | |
| | AAAAAGTTTTGGGAAACAGATGAATCCAGCAAAGATGGACCAAAAGGAATATTCCTGGGTGATCAATGGC | |
| | GAGACAGTGCCTGGGGAACATCAGATCATTCAGTTTCCCAGCCAATCATGGTGCAGAGAAGACCTGGTCA | |
| | GAGTTTCCATGTGAACAGTGAGGTCAATTCTGTACTGTCCCCACGATCGGAGAGTGGGGGACTAGGCGTT | |
| | AGCATGGTGGAGTATGTGTTGAGCTCATCCCCGGGCGATTCCTGTCTAAGAAAAGGAGGATTTGGCCCAA | |
| | GGGATGCAGACAGTGATGAAAACGACAAAGGTGAAAAGAAGAACAAGGGTACGTTTGATGGAGATAAGCT | |
| | AGGAGATTTGAAGGAGGAGGGTGATGTGATGGACAAGACCAATGGTTTACCAGTGCAGAATGGGATTGAT | |
| | GCAGACGTCAAAGATTTTAGCCGTACCCCTGGTAATTGCCAGAACTCTGCTAATGAAGTGGATCTTCTGG | |
| | GTCCAAACCAGAATGGTTCTGAGGGCTTAGCCCAGCTGACCAGCACCAATGGTGCCAAGCCTGTGGAGGA | |
| | TTTCTCCAACATGGAGTCCCAGAGTGTCCCCTTGGACCCCATGGAACATGTGGGCATGGAGCCTCTTCAG | |
| | TTTGATTATTCAGGCACGCAGGTACCTGTGGACTCAGCAGCAGCAACTGTGGGACTTTTTGACTACAATT | |
| | CTCAACAACAGCTGTTCCAAAGACCTAATGCGCTTGCTGTCCAGCAGTTGACAGCTGCTCAGCAGCAGCA | |
| | GTATGCACTGGCAGCTGCTCATCAGCCGCACATCGGTTTAGCTCCCGCTGCGTTTGTCCCCAATCCATAC | |
| | ATCATCAGCGCTGCTCCCCCAGGGACGGACCCCTACACAGCTGGATTGGCTGCAGCAGCGACACTAGGCC | |
| | CAGCTGTGGTCCCTCACCAGTATTATGGAGTTACTCCCTGGGGAGTCTACCCTGCCAGTCTTTTCCAGCA | |
| | GCAAGCTGCCGCTGCCGCTGCAGCAACTAATTCAGCTAATCAACAGACCACCCCACAGGCTCAGCAAGGA | |
| | CAGCAGCAGGTTCTCCGTGGAGGAGCCAGCCAACGTCCTTTGACCCCAAACCAGAACCAGCAGGGACAGC | |
| | AAACGGATCCCCTTGTGGCAGCTGCAGCAGTGAATTCTGCCCTTGCATTTGGACAAGGTCTGGCAGCAGG | |
| | CATGCCAGGTTATCCGGTGTTGGCTCCTGCTGCTTACTATGACCAAACTGGTGCCCTTGTAGTGAATGCA | |
| | GGCGCGAGAAATGGTCTTGGAGCTCCTGTTCGACTTGTAGCTCCTGCCCCAGTCATCATTAGTTCCTCAG | |
| | CTGCACAAGCAGCTGTTGCAGCAGCCGCAGCTTCAGCAAATGGAGCAGCTGGTGGTCTTGCTGGAACAAC | |
| | AAATGGACCATTTCGCCCTTTAGGAACACAGCAGCCTCAGCCCCAGCCCCAGCAGCAGCCCAATAACAAC | |
| | CTGGCATCCAGTTCTTTCTACGGCAACAACTCTCTGAACAGCAATTCACAGAGCAGCTCCCTCTTCTCCC | |
| | AGGGCTCTGCCCAGCCTGCCAACACATCCTTGGGATTCGGAAGTAGCAGTTCTCTCGGCGCCACCCTGGG | |
| | ATCCGCCCTTGGAGGGTTTGGAACAGCAGTTGCAAACTCCAACACTGGCAGTGGCTCCCGCCGTGACTCC | |
| | CTGACTGGCAGCAGTGACCTTTATAAGAGGACATCGAGCAGCTTGACCCCCATTGGACACAGTTTTTATA | |
| | ACGGCCTTAGCTTTTCCTCCTCTCCTGGACCCGTGGGCATGCCTCTCCCTAGTCAGGGACCAGGACATTC | |
| | ACAGACACCACCTCCTTCCCTCTCTTCACATGGATCCTCTTCAAGCTTAAACCTGGGAGGACTCACGAAT | |
| | GGCAGTGGAAGATACATCTCTGCTGCTCCAGGCGCTGAAGCCAAGTACCGCAGTGCAAGCAGCGCCTCCA | |
| | GCCTCTTCAGCCCGAGCAGCACTCTTTTCTCTTCCTCTCGTTTGCGATATGGAATGTCTGATGTCATGCC | |
| | TTCTGGCAGGAGCAGGCTTTTGGAAGATTTTCGAAACAACCGGTACCCCAATTTACAACTGCGGGAGATT | |
| | GCTGGACATATAATGGAATTTTCCCAAGACCAGCATGGGTCCAGATTCATTCAGCTGAAACTGGAGCGTG | |
| | CCACACCAGCTGAGCGCCAGCTTGTCTTCAATGAAATCCTCCAGGCTGCCTACCAACTCATGGTGGATGT | |
| | GTTTGGTAATTACGTCATTCAGAAGTTCTTTGAATTTGGCAGTCTTGAACAGAAGCTGGCTTTGGCAGAA | |
| | CGGATTCGAGGCCACGTCCTGTCATTGGCACTACAGATGTATGGCTGCCGTGTTATCCAGAAAGCTCTTG | |
| | AGTTTATTCCTTCAGACCAGCAGGTAATTAATGAGATGGTTCGGGAACTAGATGGCCATGTCTTGAAGTG | |
| | TGTGAAAGATCAGAATGGCAATCACGTGGTTCAGAAATGCATTGAATGTGTACAGCCCCAGTCTTTGCAA | |
| | TTTATCATCGATGCGTTTAAGGGACAGGTATTTGCCTTATCCACACATCCTTATGGCTGCCGAGTGATTC | |
| | AGAGAATCCTGGAGCACTGTCTCCCTGACCAGACACTCCCTATTTTAGAGGAGCTTCACCAGCACACAGA | |
| | GCAGCTTGTACAGGATCAATATGGAAATTATGTAATCCAACATGTACTGGAGCACGGTCGTCCTGAGGAT | |
| | AAAAGCAAAATTGTAGCAGAAATCCGAGGCAATGTACTTGTATTGAGTCAGCACAAATTTGCAAGCAATG | |
| | TTGTGGAGAAGTGTGTTACTCACGCCTCACGTACGGAGCGCGCTGTGCTCATCGATGAGGTGTGCACCAT | |
| | GAACGACGGTCCCCACAGTGCCTTATACACCATGATGAAGGACCAGTATGCCAACTACGTGGTCCAGAAG | |
| | ATGATTGACGTGGCGGAGCCAGGCCAGCGGAAGATCGTCATGCATAAGATCCGGCCCCACATCGCAACTC | |
| | TTCGTAAGTACACCTATGGCAAGCACATTCTGGCCAAGCTGGAGAAGTACTACATGAAGAACGGTGTTGA | |
| | CTTAGGGCCCATCTGTGGCCCCCCTAATGGTATCATCTGAGGCAGTGTCACCCGCTGTTCCCTCATTCCC | |
| | GCTGACCTCACTGGCCCACTGGCAAATCCAACCAGCAACCAGAAATGTTCTAGTGTAGAGTCTGAGACGG | |
| | GCAAGTGGTTGCTCCAGGATTACTCCCTCCTCCAAAAAAGGAATCAAATCCACGAGTGGAAAAGCCTTTG | |
| | TAAATTTAATTTTATTACACATAACATGTACTATTTTTTTTAATTGACTAATTGCCCTGCTGTTTTACTG | |
| | GTGTATAGGATACTTGTACATAGGTAACCAATGTACATGGGAGGCCACATATTTTGTTCACTGTTGTATC | |
| | TATATTTCACATGTGGAAACTTTCAGGGTGGTTGGTTTAACAAAAAAAAAAAGCTTTAAAAAAAAAAGAA | |
| | AAAAAGGAAAAGGTTTTTAGCTCATTTGCCTGGCCGGCAAGTTTTGCAAATAGCTCTTCCCCACCTCCTC | |
| | ATTTTAGTAAAAAACAAACAAAAACAAAAAAACCTGAGAAGTTTGAATTGTAGTTAAATGACCCCAAACT | |
| | GGCATTTAACACTGTTTATAAAAAATATATATATATATATATATATATATAATGAAAAAGGTTTCAGAGT | |
| | TGCTAAAGCTTCAGTTTGTGACATTAAGTTTATGAAATTCTAAAAAATGCCTTTTTTGGAGACTATATTA | |
| | TGCTGAAGAAGGCTGTTCGTGAGGAGGAGATGCGAGCACCCAGAACGTCTTTTGAGGCTGGGCGGGTGTG | |
| | ATTGTTTACTGCCTACTGGATTTTTTTCTATTAACATTGAAAGGTAAAATCTGATTATTTAGCATGAGAA | |
| | AAAAAAATCCAACTCTGCTTTTGGTCTTGCTTCTATAAATATATAGTGTATACTTGGTGTAGACTTTGCA | |
| | TATATACAAATTTGTAGTATTTTCTTGTTTTGATGTCTAATCTGTATCTATAATGTACCCTAGTAGTCGA | |
| | ACATACTTTTGATTGTACAATTGTACATTTGTATACCTGTAATGTAAATGTGGAGAAGTTTGAATCAACA | |
| | TAAACACGTTTTTTGGTAAGAAAAGAGAATTAGCCAGCCCTGTGCATTCAGTGTATATTCTCACCTTTTA | |
| | TGGTCGTAGCATATAGTGTTGTATATTGTAAATTGTAATTTCAACCAGAAGTAAATTTTTTTCTTTTGAA | |
| | GGAATAAATGTTCTTTATACAGCCTAGTTAATGTTTAAAAAGAAAAAAATAGCTTGGTTTTATTTGTCAT | |
| | CTAGTCTCAAGTATAGCGAGATTCTTTCTAAATGTTATTCAAGATTGAGTTCTCACTAGTGTTTTTTTAA | |
| | TCCTAAAAAAGTAATGTTTTGATTTTGTGACAGTCAAAAGGACGTGCAAAAGTCTAGCCTTGCCCGAGCT | |
| | TTCCTTACAATCAGAGCCCCTCTCACCTTGTAAAGTGTGAATCGCCCTTCCCTTTTGTACAGAAGATGAA | |
| | CTGTATTTTGCATTTTGTCTACTTGTAAGTGAATGTAACATACTGTCAATTTTCCTTGTTTGAATATAGA | |
| | ATTGTAACACTACACGGTGTACATTTCCAGAGCCTTGTGTATATTTCCAATGAACTTTTTTGCAAGCACA | |
| | CTTGTAACCATATGTGTATAATTAACAAACCTGTGTATGCTTATGCCTGGGCAACTATTTTTTGTAACTC | |
| | TTGTGTAGATTGTCTCTAAACAATGTGTGATCTTTATTTTGAAAAATACAGAACTTTGGAATCTGAAAAA | |
| | AAAAAAAAAAAAAAAAAAAAAAAAAA | |
| SF3A1 | ACCTTCGCGGCCGCAACTCGCTCGGCCGCCGCCATCTTGCGAGCTCGTCGTACTGACCGAGCGGGGAGGC | 9 |
| NM_005877.4 | TGTCTTGAGGCGGCACCGCTCACCGACACCGAGGCGGACTGGCAGCCCTGAGCGTCGCAGTCATGCCGGC | |
| | CGGACCCGTGCAGGCGGTGCCCCCGCCGCCGCCCGTGCCCACGGAGCCCAAACAGCCCACAGAAGAAGAA | |
| | GCATCTTCAAAGGAGGATTCTGCACCTTCTAAGCCAGTTGTGGGGATTATTTACCCTCCTCCAGAGGTCA | |
| | GAAATATTGTTGACAAGACTGCCAGCTTTGTGGCCAGAAACGGGCCTGAATTTGAAGCTAGGATCCGACA | |
| | GAACGAGATCAACAACCCCAAGTTCAACTTTCTGAACCCCAATGACCCTTACCATGCCTACTACCGCCAC | |
| | AAGGTCAGCGAGTTCAAGGAAGGGAAGGCTCAGGAGCCGTCCGCCGCCATCCCCAAGGTCATGCAGCAGC | |
| | AGCAGCAGACCACCCAGCAGCAGCTGCCCCAGAAGGTCCAAGCCCAAGTAATCCAAGAGACCATCGTGCC | |
| | CAAAGAGCCTCCTCCTGAGTTTGAGTTCATTGCTGATCCTCCCTCTATCTCAGCCTTCGACTTGGATGTG | |
| | GTGAAGCTGACGGCTCAGTTTGTGGCCAGGAATGGGCGCCAGTTTCTGACCCAGCTGATGCAGAAAGAGC | |
| | AGCGCAACTACCAGTTTGACTTTCTCCGCCCACAGCACAGCCTCTTCAACTACTTCACGAAGCTAGTGGA | |
| | ACAGTACACCAAGATCTTGATTCCACCCAAAGGTTTATTTTCAAAGCTCAAGAAAGAGGCTGAAAACCCC | |
| | CGAGAAGTTTTGGATCAGGTGTGTTACCGAGTGGAATGGGCCAAATTCCAGGAACGTGAGAGGAAGAAGG | |
| | AAGAAGAGGAGAAGGAGAAGGAGCGGGTGGCCTATGCTCAGATCGACTGGCATGATTTTGTGGTGGTGGA | |
| | AACAGTGGACTTCCAACCCAATGAGCAAGGGAACTTCCCTCCCCCCACCACGCCAGAGGAGCTGGGGGCC | |
| | CGAATCCTCATTCAGGAGCGCTATGAAAAGTTTGGGGAGAGTGAGGAAGTTGAGATGGAGGTCGAGTCTG | |
| | ATGAGGAGGATGACAAACAGGAGAAGGCGGAGGAGCCTCCTTCCCAGCTGGACCAGGACACCCAAGTACA | |
| | AGATATGGATGAGGGTTCAGATGATGAAGAAGAAGGGCAGAAAGTGCCCCCACCCCCAGAGACACCCATG | |
| | CCTCCACCTCTGCCCCCAACTCCAGACCAAGTCATTGTCCGCAAGGATTATGATCCCAAAGCCTCCAAGC | |
| | CCTTGCCTCCAGCCCCTGCTCCAGATGAGTATCTTGTGTCCCCCATTACTGGGGAGAAGATCCCCGCCAG | |
| | CAAAATGCAGGAACACATGCGCATTGGACTTCTTGACCCTCGCTGGCTGGAGCAGCGGGATCGCTCCATC | |
| | CGTGAGAAGCAGAGCGATGATGAGGTGTACGCACCAGGTCTGGATATTGAGAGCAGCTTGAAGCAGTTGG | |
| | CTGAGCGGCGTACTGACATCTTCGGTGTAGAGGAAACAGCCATTGGTAAGAAGATCGGTGAGGAGGAGAT | |
| | CCAGAAGCCAGAGGAAAAGGTGACCTGGGATGGCCACTCAGGCAGCATGGCCCGGACCCAGCAGGCTGCC | |
| | CAGGCCAACATCACCCTCCAGGAGCAGATTGAGGCCATTCACAAGGCCAAAGGCCTGGTGCCAGAGGATG | |
| | ACACTAAAGAGAAGATTGGCCCCAGCAAGCCCAATGAAATCCCTCAACAGCCACCGCCACCATCTTCAGC | |
| | CACCAACATCCCCAGCTCGGCTCCACCCATCACTTCAGTGCCCCGACCACCCACAATGCCACCTCCAGTT | |
| | CGTACTACAGTTGTCTCCGCAGTACCCGTCATGCCCCGGCCCCCAATGGCATCTGTGGTCCGGCTGCCCC | |
| | CAGGCTCAGTGATCGCCCCCATGCCGCCCATCATCCACGCGCCCAGAATCAACGTGGTGCCCATGCCTCC | |
| | CTCGGCCCCTCCTATTATGGCCCCCCGCCCACCCCCCATGATTGTGCCAACAGCCTTTGTGCCTGCTCCA | |
| | CCTGTGGCACCTGTCCCAGCTCCAGCCCCAATGCCCCCTGTGCATCCCCCACCTCCCATGGAAGATGAGC | |
| | CCACCTCCAAAAAACTGAAGACAGAGGACAGCCTCATGCCAGAGGAGGAGTTCCTGCGCAGAAACAAGGG | |
| | TCCAGTGTCCATCAAAGTCCAGGTGCCCAACATGCAGGATAAGACGGAATGGAAACTGAATGGGCAGGTG | |
| | CTGGTCTTCACCCTCCCACTCACGGACCAGGTCTCTGTCATTAAGGTGAAGATTCATGAAGCCACAGGCA | |
| | TGCCTGCAGGGAAACAGAAGCTACAGTATGAGGGTATCTTCATCAAAGATTCCAACTCACTGGCTTACTA | |
| | CAACATGGCCAATGGCGCAGTCATCCACCTGGCCCTCAAGGAGAGAGGCGGGAGGAAGAAGTAGACAAGA | |
| | GGAACCTGCTGTCAAGTCCCTGCCATTTTGCCTCTCCTGTCTCCCACCCCCTGCCCCAGACCCAGGAGCC | |
| | CCCCTGAGGCTTTGCCTTGCCTGCATATTTGTTTCGCTCTTACTCAGTTTGGGAATTCAAATTGTCCTGC | |
| | AGAGGTTCATTCCCCTGACCCTTTCCCCACATTGGTAAGAGTAGCTGGGTTTTCTAAGCCACTCTCTGGA | |
| | ATCTCTTTGTGTTAGGGTCTCGATTTGAGGACATTCATTTCTTCAGCAGCCCATTAGCAACTGAGAGCCC | |
| | AGGGATGTCCTACAGGATAGTTTCATAGTGACAGGTGGCACTTGGCTAATAGAATATGGCTGATATTGTC | |
| | ATTAATCATTTTGTACCTTGACATGGGTTGTCTAATAAAACTCGGACCCTTCTTGTGAAATCAGTTAAAT | |
| | AAGACTTGTCTCGGTCACCTGTGCCCTGTCCAGACTCGAGGCAGTGGTAACACTGCACAGTGCTATGTGG | |
| | CTTCTCTTTGAGGATTTTTGGGTTTTGTAACTAAATTCTTGCTGCCCTCATACTTTTTATGTATTAGAAT | |
| | CATATTCGTATTGCCCTTTTAAAACATTGGGATCCTCCAAAGGCCTGCCCCATGTATTTAACAGTAATAC | |
| | AGGAAGCATGGCAGGCACCATGCAAACCAAGGATGGATGGTGCAGTCCCTGTGTCAGTGGGCGGTGGTTT | |
| | CCTGCTGGCCTGGAATCACTCATCACCTGATTGATTGGCTCTGTGGTCCTGGGCAGGTGCCTCATAGGTG | |
| | TGTGGATATGATGACGTTTCTTTAAAATGTATGTATTTAACAAATACTTAATTGTATTAAGGTCATGTAC | |
| | CAAGGATTTGATAAAGTTTAAATAATTTACTCTCTACTTTTATCCATTTTATCCATTTTAACTCATGTAA | |
| | TCCTCATGTGAGTATTCCTGTTTAACACTTGAGTAAACTGAGGCACAGAGAACATAAGTTGCATGCCATA | |
| | GTCACACACTGTGAAAGTGAAAAGAGAATGTGTGCAAAACACGTCACAGTCCTGGTTTCTGAGTAAAGGC | |
| | AGGCTGTTATCTTTAGAATCAAGCTATCACAGGGAGATAGGCAATGCTGTGGGTGTTGGAGGAAGGTGAG | |
| | AGCCTGTTGCTAACAATTTCCTGGTTTTAAAGCTAAGGCTGATTTTATTGGGAAGATCTCACATGTGTGT | |
| | GGCCCCTGAGAGTTCCCAGTGCCTTTTATTTGCAGTCCTTCCATTTGGACCTCCTAGCTGCCCCATCAGG | |
| | TCATCTCCAGGGCTCAGAGGGGTGAGACCATTTCCCAAGGTCACAGAACCAGCTCTCTAGTCACCACCCT | |
| | GCCTCTCCCTCTCACCCAGAGTCAGTACCAGTTTTATGGCTTTATTACAAACTGCTGGGTCCCTCCCATT | |
| | TTCAACTTGATTGATGGGATGTCATCCCTTATCCTGTCTGACATTTGCCTCTGGCCTGGTTGCTAGAAGT | |
| | TTGCCCCAGGGGCAAGAGTTGAAATTTGGCTTCCTGAGGTGGGCTTTGTGGTTTGCGTCCCTAAAGTGAG | |
| | CCCACTACTGGTTGCTTGTCCATGGCCAACACCAGAAATCCCCTGAGCACTACCTGGGTCTCATTCCAAG | |
| | AAGGAAGAGGGTCAGGAGACCTGGGGAGTCTCATATTCCAAGTTCTTCTTTCTTTCTGGGAGCAGTGGGC | |
| | AGTTCATGGTGTTAGGGCACTCACCCCCACAGACTGGCAAACCCTGCAGGACTTCCGTGGCTGAGGCTGT | |
| | GACCGGAGGCCAGGAATGCCGTTGGGTGGATTGTGAGTGAATGGGCCCTTTGAGCTGCCCTCTAGAGAGC | |
| | AAATCCAGTTTCCTGGAGCTCCTGAATGAATATCTGTACTGGCTCGCTCAGATGCAGAAGCTCCATTGAC | |
| | CATGAGGCCTTGTGAACATCAGTGGCCACAGGCCCAGTGTGCTGCTTGGCACTGCACTAGTTTAGGACCT | |
| | GCAGCATGTAGGTAGCGTCCTAGTGTTTATAATACAAAGCTGCTCTGCACAGCTTTTCTGATTCTTCTTG | |
| | CAATCTCCTGAGGATTATCTGCCCCATTTTTAAAACGAGGTGGAATACCCAAGGTCATGTAGCCAGTGAG | |
| | TGCTCTGGAAAGCCAAAGCAGCTCATCCCTTCCTGGGGACCACACTGCTCTGCTCCACCAGACCACACTA | |
| | TGAAATAGGAATAAGTGCTCCTGTTGCAGGACTGCTGGGAAAACAGGTGGTGTGGGACTTAAGTCACCAT | |
| | AATTTTGAAGACTTGCATGCAGAGGGCTCCAGGAATTGTAGACATTAAGGAATTTCACTTTCAGTTCTAC | |
| | CCACTACTTAAGTACTTGTCATGTACTCTTAGAGGAGGCCAGTAATGATCAGAACCATTTTACTTTAAAA | |
| | TTAATAATATTGTATTAGAGAATATATTAAATGGTTATATTGGGTTATGTTAGGATATATACTTGAATGG | |
| | AAATACATGTACTATTAGCAATCATATTTCATTTATCCCTGTAATTAGACAAGAAAGCATAATATAGCTC | |
| | TACTCATGGGTACACATACCAGTGTATAAGATTTTTAGAAGTTTACTTTTTAAAAATAAAAGCAAAATGT | |
| | AAGATCTTAAAAAAAAAAAAAAAAAA | |
| SLC7A6 | CTGAGCTGCCGCGGCGGCGGCGGCGCGACCGAGCATCCTGGCGGCGCCGGGCCACTGGGAGAGTTTATGT | 10 |
| NM_001076785.2 | GGCCGAGGCAGACAAGTGGAATTAGGCCTTGCTGCAGGGGACTTCATTTCCTTCTCAGTACTGGACCCAT | |
| | TTATGAGGAGGTGGCTTATGAAAGTGTGATGTTCGCGTATTTCTTGACAGGCAGTGGCGTGATCTTGGCT | |
| | CACTGCAACCTCCGACTCCCTGGTTCAAGCGATTCTCCTGCCTCAGCCTCCTGAGTGGGGATTACAGGCC | |
| | ACAGCAAACACAGGTGTGCAGGAACCGTTTGTCATGGAAGCCAGGGAGCCTGGGAGGCCCACACCCACCT | |
| | ACCATCTTGTCCCTAACACCAGCCAGTCCCAGGTGGAAGAAGATGTCAGCTCGCCACCTCAAAGGTCCTC | |
| | CGAAACTATGCAGCTGAAGAAGGAGATCTCCCTGCTGAATGGGGTCAGCCTGGTGGTGGGCAACATGATC | |
| | GGCTCAGGGATCTTTGTCTCACCCAAGGGTGTGCTGGTACACACTGCCTCCTATGGGATGTCACTGATTG | |
| | TGTGGGCCATTGGTGGGCTCTTCTCTGTTGTGGGTGCCCTTTGTTATGCAGAGCTGGGGACCACCATCAC | |
| | CAAGTCGGGAGCCAGCTACGCTTATATTCTAGAGGCCTTTGGGGGCTTCATTGCCTTCATCCGCCTGTGG | |
| | GTCTCACTGCTAGTTGTTGAGCCCACCGGTCAGGCCATCATCGCCATCACCTTTGCCAACTACATCATCC | |
| | AGCCGTCCTTCCCCAGCTGTGATCCCCCATACCTGGCCTGCCGTCTCCTGGCTGCTGCTTGCATATGTCT | |
| | GCTGACATTTGTGAACTGTGCCTATGTCAAGTGGGGCACACGTGTGCAGGACACGTTCACTTACGCCAAG | |
| | GTCGTAGCGCTCATTGCCATCATTGTCATGGGCCTTGTTAAACTGTGCCAGGGACACTCTGAGCACTTTC | |
| | AGGACGCCTTTGAGGGTTCCTCCTGGGACATGGGAAACCTCTCTCTTGCCCTCTACTCTGCCCTCTTCTC | |
| | TTACTCAGGTTGGGACACCCTTAATTTTGTAACAGAAGAAATCAAAAACCCAGAAAGAAATTTGCCCTTG | |
| | GCCATTGGGATTTCTATGCCAATTGTGACGCTCATCTACATCCTGACCAATGTGGCCTATTACACAGTGC | |
| | TGAACATTTCAGATGTCCTTAGCAGTGATGCTGTGGCTGTGACATTTGCTGACCAGACGTTTGGCATGTT | |
| | CAGCTGGACCATCCCCATTGCTGTTGCCCTGTCCTGCTTTGGGGGCCTCAATGCATCCATCTTTGCTTCA | |
| | TCAAGGTTGTTCTTCGTGGGCTCCCGGGAGGGCCACCTACCGGACCTTCTGTCCATGATCCACATTGAGC | |
| | GTTTTACACCTATCCCTGCTTTACTGTTCAATTGCACCATGGCACTCATCTACCTCATCGTGGAGGATGT | |
| | TTTCCAGCTTATCAACTACTTCAGCTTCAGCTACTGGTTCTTCGTGGGCCTGTCTGTTGTTGGACAGCTC | |
| | TACCTCCGCTGGAAGGAGCCCAAGCGGCCCCGGCCTCTCAAGCTGAGCGTGTTTTTCCCCATCGTGTTCT | |
| | GCATATGCTCCGTGTTTCTGGTGATAGTGCCCCTCTTCACTGACACCATTAATTCCCTCATTGGCATCGG | |
| | GATTGCCCTTTCTGGAGTCCCTTTCTACTTCATGGGTGTTTACCTGCCAGAGTCCCGGAGGCCATTGTTT | |
| | ATTCGGAATGTCCTGGCTGCTATCACCAGAGGCACCCAGCAGCTTTGCTTTTGTGTCCTGACTGAGCTTG | |
| | ATGTAGCCGAAGAAAAAAAGGATGAGAGGAAAACTGACTAGAGGTCAGAGGTGGCTTTCTGAGGCCTGGA | |
| | AGGCAGGCCAACCAGCAAAATCCTGATAACAAGACTCTGTGGGCCCAACTCTCCTGAATTAAAGGAGCCT | |
| | TTTGACCCAATCATATAGTGGGGCTCAGGGCCAGTGCTCACTCTTATTGGTAAGCTATAGGAGACTCAGG | |
| | ATCTGGGCCAACCTCAAGGTGGGGGCTTCAGAGGGTGGGGGGAAGATTGGGGAACGGGGGGAATGGTCAT | |
| | TTAGTTTTACTCCTGATAGGTAGATGCAGCTCTTACAGATATTTACTTGGTAAAGTGCAGTGGGGAAGAG | |
| | GGAATGCTAGGTTGATAGGGCTGGTGGCTTCTGAATTTGGTATTTGAACTAGGAGTCCCTATAGAGGGGC | |
| | TGCTTTATGGGAAGTTTTTCTCTGACCAGGTACAACACCTGACTTTAAAGGCCTGAAATGCTACCATTTC | |
| | TTCCTCTGGCTCAAAATTCTTCCCTGGGGAGAGAGTTATATTCCCTTATTTATTGATATTTAGTCCAGAA | |
| | CACCAGTTCTAACGAAGCATGCGTGTCTCTTCATCTACAGGATGCAATAGGCTGATTGTATTTAAAAATC | |
| | AAAGTACCCAAAACTGAGTCCCTTTGGGCTCAGAAATGTCTGTGGTATTGGGTCAGACTCTGACCACAGG | |
| | TTTTATGCTGTTTAGCACAATTTCTATTGAGTCTTACCTGCAACAATGAACCTTAAAGATTTTTTTACTC | |
| | ACGTACCTGTTACACTTTAGCATACAGATAGATCATAGATCACGTTACAAGCACTTGGCTCAGGTCCAGC | |
| | AAGGACAGATGAACAAATTCCTGAGTCAGAAGTCTGTTAATATTGCTGTTTTGAAGGACAATCCTTTATT | |
| | TTACTTGAGACCTTACATCTTTGTTCTAGCTGACAGTAAATCTCTGGGTTTCTGTTACGAACTCTAAGAG | |
| | GGCTGAAACTTCTGATATTCAGGTGGATCACCTGAATTCTCTCAGCTGTCAATGGCTTGGAGAACATCTC | |
| | ATGGGCCCAAGTCATCAAATAACCTGTTCCTCTCTGTAAGGGCAGTGTGAGGGACTGCTGTGCAGACCCA | |
| | AGCAATCCCAACCTGGTGCTAGGTCATTTCACTTTTCTGAAAACCTCACATCAGGCTGCATCCTCTTCTG | |
| | TCCCTGGCACCAGGCTTTGTTTACACTTGGAGCCACCTTGGTGTGGGTCACCGGGACAGTGTACTCCTCT | |
| | CCTGCCAGCCTCCCCTTCCCCGAGGTGTGGTGGCTGCAGTCTCAGGAAGAGCTTGGTACTTGTGGGGACT | |
| | TCTGTTTTCTCCCTGTGGAGATCAGTGAAGACTGGGAGGAAAGCTGCTTCAACCTGAGTCCGGCTCTTCA | |
| | GCAGGCTGCACAAGTGGAAGCAACTAATTCTGGTGCTCAGGCTGGGCTCTCCACCCAAGTTAGGCCTGCT | |
| | CTGGCCTAATGGATCTTACTGTATGAGCAGGACGGCTGCATTGGATTGTACAACTGTTTTGTGATGCCCC | |
| | CAGACACTGTCATCCTGGGCCGAGAAGAACCTGCTAGCTTGACATACCCCATGGGCTTATCCTTAGGTTT | |
| | TGGAATTGGTCAACAGTGAGGCAGTCTCCCTTCCTGACCATTCTTCTCCACCCAGTCACAGATAAGGGAA | |
| | TAACCTTGGCCATATATTTGCTCAATAAAGATTGAAGGAAGCATGGTCATAGTTGCCCTGGGTTCAGAGC | |
| | ATAATGCATATGTGAAGCATGGGGTGACATTCCTACTGTCATGGGTTTGGGATTTGTAACGGCAAATTCC | |
| | TGCCCGACGACAGGGTGTCTTATGCAAAGGCTGACTTGCCTGAACGCTAAGAACATGACTTCTGTCTGAG | |
| | CTAAGCTGGCACCCATCCCAGGGCTCCTCTGGAGCTAATCCTTTAAGCAAAATGTGCTTGCCTTTTAAAG | |
| | ATCCCTGACCCCAGCTTTAGCTTTCTCCACCAGATAACCAGCTAATCCCAGGAATTTGCTGCCCCCCACC | |
| | AGTGGCTTCTAGGGAAAGCAAGGACCTCACATGCCAGGTGCCCTAGTACTTGCTTAGTGAGCCATGTCAT | |
| | CCTCCTTTCATTTTTGGATGGTGACAGCATTTTTCCCCTCTGTGCTGGATACAGACTTCTCCCAGGATCC | |
| | TCTCTTTGGGAGCGAAGCCAGAGGATCCCTACAGCACTCAAGCTTCATGGTGGAATTAATTTCTGCCAGC | |
| | TCTTTGTTGTCTGTCTCCTTAAATCCTTTTCCTGGTGTGCTTATTATCCCTTTTGCAGTGAGTACAGTTT | |
| | ATTAAGTTGTCAGCCCTTTAATATTGGGGAAACTTAATGAGTATAAATAGCAGGGAGCACATTGTAACAG | |
| | CACAGTGTTTTGTTTTTTTCACCCGGTTGCTGTATGAGAATGGCTTTCAATCCTTTGTTTCTATGCCTAC | |
| | AGACAGAAAGCAAGATGTCTAATATTAGACATACAAGTTGCTGCCTGTTATAACGGTGAATTATACCTTT | |
| | GTGCATGCCTAGGATGTTTGTTGTTTTAATTAGCTGCAATATATACGGCCTGTGTACACAGAATTTAATC | |
| | ACTTCGGCAGGTTGAACAACTCCATGTAGATAAGAGCAAGTGTAGGCAAAGGTTTAGAAAATGGACATAA | |
| | AGTCAAAGAATGATGGCAGGTAGGATGAAGGAGAGATACTTAGGAAATCCTAAAAGAGGCGGCAAGAAGG | |
| | TACCTCCCTGTGTAACTCACCTTCCCCCATGACAGTGAGTAAGAGACACTCACAGGCTATGAGGGTACAC | |
| | CCCTAGCTGAATGTTCTGTGTTGTTTCCTTAGACCTGTGGTGTCCGCTGCAACAGCTACTAGCCACGTGT | |
| | AGCTAATTACATTAAAATGAAATAAAATTAAAAGCTCAGTTTCTCAGTTGCGCTAATCACATTTCAAGTG | |
| | CTCAGCAGCCACCCGTGTCTACTACTACACAGTGCAGACACAGAACATATCATCACTGCAGATAGTTCTA | |
| | CTGGACAATGTTACGCTAGAATAAACACCAAGGCAGTCAGTTAAGGCAGCTATGGTTTGGAAAGGCATAC | |
| | GGACAGAGTCTGCTTAGAAGAGATACAAGTTGTTAATAAAATTGATCCTGTTGATAGTAGTTTGTTTTTG | |
| | TGGTGGGTGCTGTGAAGAGTAAACATTACTCAGTGGAAAGCTAAGTTCAGAAGGTACTTTGTTTTTCCTC | |
| | CCTTGCCTTAAGTCCTTGGTATTTATAATCAATGCTGAACCTTCTATTTCACTACCGCTCCCTGTTTTAG | |
| | ATATTCAGATTTAAAAGGTTTTCAAAGAATTACTTTCTTCCATGTTCAAAGCTAGATTTTACTAAACACA | |
| | TGTATCACATTCATATATATTGTTTCTTGGCCCCACTGCCAAAGGAAGTCAGTCAGTAATTTCACAACCG | |
| | TTATCAGAGTTTGGAAGCAGAAATAGCTGTTAACTAAAATCTCCCACTGCTCAGACTACTTTCTGCCCTA | |
| | ATGGCCATTACTATCCAGTCTGTATTGCTACAAGGGACCCACTGGTACCCCTTTTAGATTCTATCAAAAG | |
| | GAACAGGGTTTTCCTAGAGGCAGGCAGCCTGGTGGTATGGCACAGCAGAAGCTTACTGCTAATGAAATGG | |
| | GAACCTCCCCCTCCCTTGTGGTTTCAGCACAGAACCTGAATGCCAGGAAAAATTCCTGGGCCAAGAAGCT | |
| | AAAGCTAAAGAAACCTTCCTTTTTTCAACGTTTTTTTTTCTTTCAAACTGTAGGGTCACTTTTGATTGAG | |
| | GCAAAGGGGTCCTACTGTAAGTGGAAAAGACTCACTCCCCTAACATAAGTTTTCACTGTGGTGGGATGGT | |
| | GCCGCCCGATATGCTTGATATGCTTTTCCTTCCACATGTTAAGCTAGGAAACCTAACAGGATGTCAGCAG | |
| | GGCAGTTAACTCTGGACTCAGAGCCCTCAAGGGCATGTGGCAGAACCTCATGGACATCACAAGACCATCA | |
| | GTCTGAATCCAGGTCGTGGGGGCTGTCATAGCCGAACTCCTTCTGCACATCCAGAGGGTACTTGCTCCAC | |
| | ATCCGCTGTCTGCTGCTGCCTCTTTCCTCCTCACTCAGGCTGTTGTAGTCAGCAGAGCCTAGAATGACAT | |
| | CCCGGGAGTGGATTCTAAATGTGATTTTCCTAGGCTACTGCAGGAGCCCCTTCTCTTCTCAGAAAGGTCT | |
| | GTTTTTGTTCCCGATTGTAATGCAAAATCCTTGCTCAATAAATAAAAAAGAATATAGAATTCTTTTTTTT | |
| | TTAAAGAAGGAATCACTTTCCTATCATCTAAACCAAGTTCCTTCACACTGGAGTATTTTGTCACTTCTCC | |
| | CCTCCGTGGAGTATTTTGTCACTTCTCCCCTCCGTATAGGATTTTTTGTTGTTGTAAGAGTTGTAGTCAT | |
| | ATTGTAAATATTTTTGTACCTTTCTCCTTTTAACGTGTTATTGACAAACCTCCCCAAAAGAATATGCAAT | |
| | TGTTTGATTCATTTCTCTGTTATCAGACACCAATAAATTCTTTTTGTTGGGCCTTCAAAAAAAAAAAA | |
| S100A11 | GGGCAAGGCTGGGCCGGGAAGGGCGTGGGTTGAGGAGAGGCTCCAGACCCGCACGCCGCGCGCACAGAGC | 11 |
| NM_005620.1 | TCTCAGCGCCGCTCCCAGCCACAGCCTCCCGCGCCTCGCTCAGCTCCAACATGGCAAAAATCTCCAGCCC | |
| | TACAGAGACTGAGCGGTGCATCGAGTCCCTGATTGCTGTCTTCCAGAAGTATGCTGGAAAGGATGGTTAT | |
| | AACTACACTCTCTCCAAGACAGAGTTCCTAAGCTTCATGAATACAGAACTAGCTGCCTTCACAAAGAACC | |
| | AGAAGGACCCTGGTGTCCTTGACCGCATGATGAAGAAACTGGACACCAACAGTGATGGTCAGCTAGATTT | |
| | CTCAGAATTTCTTAATCTGATTGGTGGCCTAGCTATGGCTTGCCATGACTCCTTCCTCAAGGCTGTCCCT | |
| | TCCCAGAAGCGGACCTGAGGACCCCTTGGCCCTGGCCTTCAAACCCACCCCCTTTCCTTCCAGCCTTTCT | |
| | GTCATCATCTCCACAGCCCACCCATCCCCTGAGCACACTAACCACCTCATGCAGGCCCCACCTGCCAATA | |
| | GTAATAAAGCAATGTCACTTTTTTAAAACATGAAA | |
| ASF1A | AAAAAGAGGAAAAAAGTTTCTCAAGTCGCCGCTGCACGACGTCTGGCCGGCGCTGGAGCGGGGGTCTGCG | 12 |
| AF279306.1 | CTCTCCCGAGCGGCCGCGCGCTGGACTTTATTGTGCCGCAACCAGCCCCAGTTCCCATTGTTTGTGTTTT | |
| | TTTCAAAATATGGCAAAGGTTCAGGTGAACAATGTAGTGGTGCTGGATAACCCTTCTCCTTTCTACAACC | |
| | CGTTCCAGTTCGAGATCACCTTCGAGTGCATCGAGGACCTGTCTGAAGACTTGGAATGGAAAATTATCTA | |
| | TGTGGGCTCTGCAGAAAGTGAAGAATACGATCAAGTTTTAGACTCTGTTTTAGTGGGTCCTGTTCCCGCA | |
| | GGAAGGCATATGTTTGTATTTCAGGCTGATGCACCTAATCCAGGACTCATTCCAGATGCAGATGCAGTAG | |
| | GCGTAACTGTTGTGCTAATTACTTGTACCTATCGAGGACAAGAATTTATTAGAGTTGGCTATTATGTAAA | |
| | TAATGAATATACTGAGACAGAATTAAGGGAAAATCCACCAGTAAAACCAGACTTTTCTAAGCTTCAAAGG | |
| | AATATTTTGGCATCTAATCCCAGGGTCACAAGATTCCACATTAATTGGGAAGATAACACAGAAAAACTGG | |
| | AAGATGCAGAGAGCAGTAATCCAAATCTACAGTCACTTCTTTCAACAGATGCATTACCTTCAGCATCAAA | |
| | GGGATGGTCCACATCAGAAAACTCACTAAATGTCATGTTAGAATCCCACATGGACTGCATGTGACCACCT | |
| | ACCATCCCTTTAGTACAAATTAAGGTATTAAAAATACACAGAACTATTTCCCTGAAATTCCGTAAGTACA | |
| | TAGTCAAAACACAATGTGAAGAATTTGTTTAAAAACATCCTGTAGAAAGTTTATAAGAAAACCAGTATTT | |
| | GAACAAATTGTGGAATATAAATACAACTATTTTTAAGTAAAAAAAAAAA | |
| BLVRA | CCGCCCCGGTCCGCAAAGCCGGTGGCGCCCGGAGGCTGCACGGAGAGCGGTGCCCGCGTCAGTGACCGAA | 13 |
| NM_000712.3 | GGAAGAGACCAAGATGAATGCAGAGCCCGAGAGGAAGTTTGGCGTGGTGGTGGTTGGTGTTGGCCGAGCC | |
| | GGCTCCGTGCGGATGAGGGACTTGCGGAATCCACACCCTTCCTCAGCGTTCCTGAACCTGATTGGCTTCG | |
| | TGTCGAGAAGGGAGCTCGGGAGCATTGATGGAGTCCAGCAGATTTCTTTGGAGGATGCTCTTTCCAGCCA | |
| | AGAGGTGGAGGTCGCCTATATCTGCAGTGAGAGCTCCAGCCATGAGGACTACATCAGGCAGTTCCTTAAT | |
| | GCTGGCAAGCACGTCCTTGTGGAATACCCCATGACACTGTCATTGGCGGCCGCTCAGGAACTGTGGGAGC | |
| | TGGCTGAGCAGAAAGGAAAAGTCTTGCACGAGGAGCATGTTGAACTCTTGATGGAGGAATTCGCTTTCCT | |
| | GAAAAAAGAAGTGGTGGGGAAAGACCTGCTGAAAGGGTCGCTCCTCTTCACAGCTGGCCCGTTGGAAGAA | |
| | GAGCGGTTTGGCTTCCCTGCATTCAGCGGCATCTCTCGCCTGACCTGGCTGGTCTCCCTCTTTGGGGAGC | |
| | TTTCTCTTGTGTCTGCCACTTTGGAAGAGCGAAAGGAAGATCAGTATATGAAAATGACAGTGTGTCTGGA | |
| | GACAGAGAAGAAAAGTCCACTGTCATGGATTGAAGAAAAAGGACCTGGTCTAAAACGAAACAGATATTTA | |
| | AGCTTCCATTTCAAGTCTGGGTCCTTGGAGAATGTGCCAAATGTAGGAGTGAATAAGAACATATTTCTGA | |
| | AAGATCAAAATATATTTGTCCAGAAACTCTTGGGCCAGTTCTCTGAGAAGGAACTGGCTGCTGAAAAGAA | |
| | ACGCATCCTGCACTGCCTGGGGCTTGCAGAAGAAATCCAGAAATATTGCTGTTCAAGGAAGTAAGAGGAG | |
| | GAGGTGATGTAGCACTTCCAAGATGGCACCAGCATTTGGTTCTTCTCAAGAGTTGACCATTATCTCTATT | |
| | CTTAAAATTAAACATGTTGGGGAAACAAGAAAAAAAAAAAAAAA | |
| BTG3 | CCCTCTTCCGGGCCGCGAGCCCCCTGCGCGCCGCTTTGGGGCTGCGCTCACTCGTGTGCGCGCTCGTCCG | 14 |
| NM_001130914.1 | CCCGCCAGTCCTCTCAACGCGCGCTTGGCCGCCCGACGACGCGGGAGCCGCACGCGCCGGACGAGGCTCG | |
| | CTGCGCTCCCTGTTGCCCAGCGCGGGCCCGTTGAGGCGGAGCCCTCAGTTCCCGGCCAGGACACGGTCTG | |
| | GGCCGCCGAATCTCCGGCCGAAGAGCGGCGGCGGCAGCGGCGGGAAAAAAATGAAGAATGAAATTGCTGC | |
| | CGTTGTCTTCTTTTTCACAAGGCTAGTTCGAAAACATGATAAGTTGAAAAAAGAGGCAGTTGAGAGGTTT | |
| | GCTGAGAAATTGACCCTAATACTTCAAGAAAAATATAAAAATCACTGGTATCCAGAAAAACCATCGAAAG | |
| | GACAGGCCTACAGATGTATTCGTGTCAATAAATTTCAGAGAGTTGATCCTGATGTCCTGAAAGCCTGTGA | |
| | AAACAGCTGCATCTTGTATAGTGACCTGGGCTTGCCAAAGGAGCTCACTCTCTGGGTGGACCCATGTGAG | |
| | GTGTGCTGTCGTAGAGATGGGGTTTCACCATGTTGGCCAGACTGCTCTCAAACTCCTGACCTCGTGATCC | |
| | GCCCGCCTTGGCCTCCCAAAGCGCTGGATTACAGGCGTGAGCCACTGCGCCCGGCCTCCTCCTTTTTGAT | |
| | TATGTATGGAGAGAAAAACAATGCATTCATTGTTGCCAGCTTTGAAAATAAAGATGAGAACAAGGATGAG | |
| | ATCTCCAGGAAAGTTACCAGGGCCCTTGATAAGGTTACCTCTGATTATCATTCAGGATCCTCTTCTTCAG | |
| | ATGAAGAAACAAGTAAGGAAATGGAAGTGAAACCCAGTTCGGTGACTGCAGCCGCAAGTCCTGTGTACCA | |
| | GATTTCAGAACTTATATTTCCACCTCTTCCAATGTGGCACCCTTTGCCCAGAAAAAAGCCAGGAATGTAT | |
| | CGAGGGAATGGCCATCAGAATCACTATCCTCCTCCTGTTCCATTTGGTTATCCAAATCAGGGAAGAAAAA | |
| | ATAAACCATATCGCCCAATTCCAGTGACATGGGTACCTCCTCCTGGAATGCATTGTGACCGGAATCACTG | |
| | GATTAATCCTCACATGTTAGCACCTCACTAACTTCGTTTTTGATTGTGTTGGTGTCATGTTGAGAAAAAG | |
| | GTAGAATAAACCTTACTACACATTAAAAGTTAAAAGTTCTTACTAATAGTAGTGAAGTTAGATGGGCCAA | |
| | ACCATCAAACTTATTTTTATAGAAGTTATTGAGAATAATCTTTCTTAAAAAATATATGCACTTTAGATAT | |
| | TGATATAGTTTGAGAAATTTTATTAAAGTTAGTCAAGTGCCTAAGTTTTTAATATTGGACTTGAGTATTT | |
| | ATATATTGTGCATCAACTCTGTTGGATACGAGAACACTGTAGAAGTGGACGATTTGTTCTAGCACCTTTG | |
| | AGAATTTACTTTATGGAGCGTATGTAAGTTATTTATATACAAGGAAATCTATTTTATGTCGTTGTTTAAG | |
| | AGAATTGTGTGAAATCATGTAGTTGCAAATAAAAAATAGTTTGAGGCATGACAAAA | |
| C10orf7 | ATGAAGAAGGAGCATGTGCTTCACTGCCAGTTCTCCGCGTGGTACCCGTTCTTCCGAGGCGTTACCATCA | 15 |
| CR456966.1 | AGAGTGTCATTCTTCCACTTCCTCAGAATGTGAAGGATTATTTACTCGATGATGGAACTCTGGTGGTTTC | |
| | AGGAAGGGATGATCCACCAACACATTCTCAGCCAGACAGTGATGATGAAGCAGAAGAAATACAGTGGTCT | |
| | GATGATGAGAACACAGCCACGCTTACGGCACCAGAATTTCCTGAGTTTGCCACTAAAGTCCAGGAAGCTA | |
| | TCAATTCCCTCGGGGGCAGTGTCTTTCCTAAGCTTAATTGGAGTGCCCCAAGGGATGCGTATTGGATAGC | |
| | AATGAATAGTTCTCTGAAATGTAAAACCCTCAGCGACATCTTTCTGCTTTTCAAGAGTTCCGATTTCATC | |
| | ACTCGTGACTTCACTCAGCCGTTTATTCATTGTACTGATGATTCTCCAGATCCATGTATAGAATATGAGC | |
| | TCGTTCTCCGAAAATGGTGTGAATTGATTCCTGGGGCTGAGTTTCGATGTTTTGTCAAGGAAAACAAGCT | |
| | TATTGGTATTTCTCAAAGAGACTACACACAATACTATGATCATATTTCTAAACAAAAGGAAGAAATTCGC | |
| | AGATGCATACAAGACTTTTTCAAGAAACACATACAGTACAAATTCTTAGATGAAGACTTTGTGTTCGATA | |
| | TATACAGAGACAGTAGGGGGAAGGTGTGGCTCATTGACTTTAATCCATTTGGTGAAGTCACAGATTCACT | |
| | GCTGTTCACCTGGGAAGAACTGATATCTGAGAACAACTTAAACGGCGATTTTAGTGAAGTTGACGCTCAA | |
| | GAGCAGGATTCCCCAGCTTTCCGTTGCACAAACAGTGAAGTGACAGTCCAGCCCAGCCCCTATTTGAGTT | |
| | ACCGGCTACCCAAGGACTTTGTAGACCTCTCTACTGGGGAGGACGCTCACAAGCTAATAGACTTCCTTAA | |
| | GCTGAAGAGAAATCAGCAGGAGGACGATTAA | |
| C16orf45 | GTGCATCCCTGCCCCTTCTGGGTACCCGTAGGCGCTCCCGGGCGCTGGCGGCGGCGGAGGAGAGGGAGCA | 16 |
| NM_033201.2 | GCGTCACGGGCGCCCGGCCCGTTAAAACGCTGCTGGCTGGAGCCACCTCCCTCCCTGCAGCCCGCAACGG | |
| | GAATGGAGTAAAGGGAGACCCGTCGACCTGGCCACGGGGATCAGCGATGGAATTAAAGCAATCTTTGTCC | |
| | ACCCATCTGGAAGCCGAGAAGCCTCTGAGGCGCTATGGGGCGGTGGAGGAGACGGCTTGGAAAACGGAGA | |
| | GACTGGGGAGAAATCAGCTGGACATCATCTCCATGGCGGAGACAACCATGATGCCAGAGGAGATTGAGCT | |
| | GGAGATGGCAAAAATTCAGCGTCTCCGGGAAGTCTTGGTCCGCCGGGAGTCTGAGCTCAGGTTCATGATG | |
| | GATGACATCCAGCTCTGCAAGGACATCATGGACTTGAAGCAGGAGCTGCAGAACTTGGTCGCCATCCCAG | |
| | AAAAAGAAAAAACCAAACTGCAGAAGCAGAGAGAGGATGAGCTAATCCAGAAGATCCACAAACTGGTGCA | |
| | GAAGAGAGACTTCCTGGTGGACGATGCGGAGGTCGAGCGGTTAAGGGAGCAAGAAGAAGACAAGGAAATG | |
| | GCTGATTTCCTGAGAATCAAGTTAAAACCTCTAGACAAAGTAACCAAATCTCCAGCCAGCTCCCGGGCAG | |
| | AGAAGAAAGCAGAGCCCCCACCTAGCAAGCCCACGGTGGCCAAGACGGGGCTGGCACTGATCAAGGATTG | |
| | TTGCGGGGCCACCCAGTGCAACATCATGTAGCCCCCACGTGGGGTGCCCTGGGCCATGGGGACCCCCCCC | |
| | CACCCTCTTGTCTTTATAGCCCCCATTTCACCGGGGCCCAAGAGCTCTCCAAGGCAGAAGGGGTTGAAGG | |
| | CAAGCCCGTGACTGTCACCAGAGGCCATGGGCACGGCAGGCGGGCCTGGCCACCCTGTACAGAGTGTAGC | |
| | AGTAGGGAGTCTCTCACCGTCGCATGGTCCTCCCCAGAGCATGCCGAACCCAGGAGTCTGTCTCACTGTT | |
| | TATCCAAACACCAGGAAAGGTCCTCCCTCAAAAAAGCATATCTCCACTTCTCTCTAGCTGTATCTAACCC | |
| | ACCGTGTGAATGAACTGGGAGAGGGGCATGCTCCCCAGCTGTGTGTAGTCGTGACTTCTCAACAATCTAG | |
| | CACCATGTCGGACACGTTCCCCATCCACCCTCCTAGCTCTGCTCTCAGAGCTAGGCACATGGGCACAGGT | |
| | CCCCTCCCGTCTGTCCTCTCCCAGCAACTGTGCCCTGGAGGGCTCCACATGGCCCCCGTGTCTCTCGGGC | |
| | ACCACCCATATAGCAGTCCCAGAGGGCCCATCTGTAAAGATCGAGCTTGTGTGTGGTGTCGTGGTCACAT | |
| | CTCCCGCTTCCCCCCATCCTGTGTCTGGGCACAGTTCACATCAGGACAGCGTCCATTGTGCTCTCAGTCT | |
| | GCCTCAGGTGTGTGCCTGGAGGGGGCCTGGACTGGCATGGATCCAGTGTGCAGAAGAGCCAGCAGGGAAC | |
| | CGGAAGCTCTGATGTCAAGGCCAGAGCAGTTGAGAATGGGACCCAGAGTAGATGCTGACCTGGGCACTCC | |
| | ACCATTCCGGGGCCACCACAGAGATGCCAGCAGGATGCCACTTTGCCAGCCCGACACACGGACCTTTGTA | |
| | AAGAACAGCAACAGGCAGGAGAGGCAGCGTGTGACCAGATTGTGTCCCGTCATTGGGTGGCATATGTTAA | |
| | CTAGCTGCCAAACAACTTCAACCCGTGTAATTCATGTACATTTGCAACAGCCAGCCCGGTACAGCCTGTG | |
| | TGACTTCTCTGTATGTGTGTGTGTGTCGTGACCAGCCTAAGTAGTTAGCATAACTCAAGATGCTGATGTG | |
| | CAGTCACCCATCAGAGAAAATAAAAATGGAAACCACGTTCACAGCATTTTAAAAGTTTTTACTTTTTTTC | |
| | TTGATTATGGAAGTAATCCATGTACATAGTAAATCATTTTAAAAGTACAAAAAGTATGAAGAAGTTTGTC | |
| | TTAAAAAAAAAAAAAATTATTCCTCCAACTAGAGACCACTCTGATGTTTCGACGTTTTAAAAAAGTCTTT | |
| | TTTTGTGCATTTTTTCATCGTTGACATCATATTGTGGTATCATTTATAACCAGTTTTTTCCTACTTATTA | |
| | TACCACCATCTTCCACATCATTAAAAGCTCTTTGTAAACATTAAACACTCTTCATAAATCAAAA | |
| CAMK2N1 | GCCTCGCCTCGGCGCCGCGGCCGGCATTTCTCCTCGCAGCTCGCTGCCTCCTCTATCCCTGCCTCCCTCT | 17 |
| NM_018584.5 | CCCCCCTCTGTTTTTCTCCCTTCCTTCCCTCTCCGACCCTCTTCCTCTCCCTCCCGATCCTTTCCCTCCT | |
| | CCTCTCATCTTTCCCCTGTCTCTCCGTTCTAGCTCGTCCCCCACCCCACCTTTTCTTCTTTCTCCTCCTC | |
| | TCCTTCCTCTCCCCCTCTCCTCTGTCTCCTTCCACCGTCTCCCCTGCCTCCCTGTCTTTCAGTCCCTGTT | |
| | TTTCAGCCCCGTCTCCCTCTCGGTTTCTCTCCCCCACCCTCCCTCCGGGTTTCCTCCCCGGTGCCCTCCC | |
| | TCCTCTCTCCCTCCCCTCCCCCTCCGCCCCTCGCAGCCCCGCCGCTCGCAGCTCCCAGTCTGCCTCCCCG | |
| | AACCGGCGCCGCCGCCCGCACTCGCCGCAGGACCGGCCCGCCCGGCTCCCGGGGTGCGCCCTCCTCGGTC | |
| | CCGCGCCCTCCGGGCTCGCAGGGACGTCTCCTCCCTCCCGGCTCGCGGCCCCGCCCGGCCCGGCCCCCGC | |
| | CCAGAGCCCCAGCGCGCCGAGGATGTGAGTCCTGCTCGCCTCTGGCGGAGCAGCAGCCACTCGCGCGCGG | |
| | AGCCGGAGCGCAGCGCAGCGCAGCCGCGGGCGCTCTCCGGGCCGCTCGCGCGAGTGCCGCGCTCTTGCCC | |
| | TAGCGGCGTCCCCCGGCCTCTCGCCGGCGCCACCGCCGCAGCAGCCCGCGGGCCGTCCCCGGCCGGCCGC | |
| | CCCCGGCCCCAGCGCCGCTGACCCTGTCCGCCGCGGGCGGGGACGCGGGCGGAGGAGGCGCCGCGGCGGA | |
| | GCCCCCGGACGCGACCATGTCGGAGGTGCTGCCCTACGGCGACGAGAAGCTGAGCCCCTACGGCGACGGC | |
| | GGCGACGTGGGCCAGATCTTCTCCTGCCGCCTGCAGGACACCAACAACTTCTTCGGCGCCGGGCAGAACA | |
| | AGCGGCCGCCCAAGCTGGGCCAGATCGGCCGGAGCAAGCGGGTTGTTATTGAAGATGATAGGATTGATGA | |
| | CGTGCTGAAAAATATGACCGACAAGGCACCTCCTGGTGTCTAACTCCCCCAAAGACAATGAGTTAAGGGA | |
| | GAGAATAAGAACGGCGGTAACAGTTATTGGCAAAAAGCATGAAAAGAGAAAGCACTTTGAAATTTATTAC | |
| | TAGCTTGCTACCCACGATGAAATCAACAACCTGTATCTGGTATCAGGCCGGGAGACAGATGAGGCGAGAG | |
| | GAGGAGGAGGAGGAGGAGAAGGCTCTGGGCTCCTCTGCAAAAATAAAAATAAAAAAATAAATAAAATTTT | |
| | AAAAATAATAAAAATTCACTATATACACATATAAAGAAATAAAAAGAAGTCTCAGTTGCAGCTATTTGTC | |
| | AAAATTAATATCCATTTCTTTTTATATACGGTGAATATTGCGCAATTATAGATCTGGATTTTGAACCACT | |
| | TAATGAAGCGGCAACACCAGGTGTTTTGAGGTGTTGGCATTCTTCGCTGATTTGGCTGTTCCCAATGTTT | |
| | ACATTATTTAATCTTGCAAAAATGGTTCTGTGCACTTGGATGTGAAATGCTGTCCAGTTTTATTTTTTTT | |
| | ATGTTGTTATCCTTGGATGTACAAAAAATTCAGAAAATGATCTCTGTAGATATTCTGTTTTATTTTGGTC | |
| | ATCTTTAGAAGTTATCAGGAATGTGTTTAAAACAAGAAGAGAACTTTTCTAAGGAATGATACATAGAAAA | |
| | GATTTTATTTTAAAATGAGTTGTAAAGCTTGTGTTTCTTTGTTGCTGCAAGCTATCTGCCCAAGTTAATG | |
| | CAAATGGACACATTTTTTATGTCAGAAAAACACACACACACACACACACACACACACACACACACGAAAA | |
| | ACAAAGAAAAAAATGCTTGAGCTTTTTCTAACTTCCCCTTGCAGTCTGTTGTGTGAGCAGCCTGTTTATT | |
| | TCTCTAATATTATGTCAGTTTATTCTCTTTAATGGACTGTAAAAAAATGTAATCACAAGAGTGCCAAATA | |
| | TCTTGAAATGCCAAAAGGCATTTTAGTTTCTTTTCTCTGTGCTCTGAGTCCACGTACAGGAATGCTTGGA | |
| | GTGTCTTTTCTGTTATTTATAGGGATTCTCTTAAGGCACACCAGCTGCCTGTTTTGCATGGTATTTGCAA | |
| | AAATGCCTCTTGCGTGAGGAAATCTTTTACCATTTTTTGTTTGCAACTTTGGACCTCAAGAGGTTTCCCT | |
| | TCCCTTCCCCGTTCCCTCTTTTCTTAATTCAATATTCTGTATGTTGCACCTTGAACCAGCACACAGGGCT | |
| | ATTTCTCCAATGTACAATAAAAGAATTGTTCCTGTGTCTCAAAAAAAAAAAAAAAAAAAAA | |
| CHI3L2 | GACAGGCTGTCGAAACCTCAGTGGATAAAAGACCTAGAGAATGTGTATCCCAGAAGAAGCTGGCCAAGGA | 18 |
| NM_004000.2 | TATGGGAGCAACCACCATGGACCAGAAGTCTCTCTGGGCAGGTGTAGTGGTCTTGCTGCTTCTCCAGGGA | |
| | GGATCTGCCTACAAACTGGTTTGCTACTTTACCAACTGGTCCCAGGACCGGCAGGAACCAGGAAAATTCA | |
| | CCCCTGAGAATATTGACCCCTTCCTATGCTCTCATCTCATCTATTCATTCGCCAGCATCGAAAACAACAA | |
| | GGTTATCATCAAGGACAAGAGTGAAGTGATGCTCTACCAGACCATCAACAGTCTCAAAACCAAGAATCCC | |
| | AAACTGAAAATTCTCTTGTCCATTGGAGGGTACCTGTTTGGTTCCAAAGGGTTCCACCCTATGGTGGATT | |
| | CTTCTACATCACGCTTGGAATTCATTAACTCCATAATCCTGTTTCTGAGGAACCATAACTTTGATGGACT | |
| | GGATGTAAGCTGGATCTACCCAGATCAGAAAGAAAACACTCATTTCACTGTGCTGATTCATGAGTTAGCA | |
| | GAAGCCTTTCAGAAGGACTTCACAAAATCCACCAAGGAAAGGCTTCTCTTGACTGCGGGCGTATCTGCAG | |
| | GGAGGCAAATGATTGATAACAGCTATCAAGTTGAGAAACTGGCAAAAGATCTGGATTTCATCAACCTCCT | |
| | GTCCTTTGACTTCCATGGGTCTTGGGAAAAGCCCCTTATCACTGGCCACAACAGCCCTCTGAGCAAGGGG | |
| | TGGCAGGACAGAGGGCCAAGCTCCTACTACAATGTGGAATATGCTGTGGGGTACTGGATACATAAGGGAA | |
| | TGCCATCAGAGAAGGTGGTCATGGGCATCCCCACATATGGGCACTCCTTCACACTGGCCTCTGCAGAAAC | |
| | CACCGTGGGGGCCCCTGCCTCTGGCCCTGGAGCTGCTGGACCCATCACAGAGTCTTCAGGCTTCCTGGCC | |
| | TATTATGAGATCTGCCAGTTCCTGAAAGGAGCCAAGATCACGCGGCTCCAGGATCAGCAGGTTCCCTACG | |
| | CAGTCAAGGGGAACCAGTGGGTGGGCTATGATGATGTGAAGAGTATGGAGACCAAGGTTCAGTTCTTAAA | |
| | GAATTTAAACCTGGGAGGAGCCATGATCTGGTCTATTGACATGGATGACTTCACTGGCAAATCCTGCAAC | |
| | CAGGGCCCTTACCCTCTTGTCCAAGCAGTCAAGAGAAGCCTTGGCTCCCTGTGAAGGATTAACTTACAGA | |
| | GAAGCAGGCAAGATGACCTTGCTGCCTGGGGCCTGCTCTCTCCCAGGAATTCTCATGTGGGATTCCCCTT | |
| | GCCAGGCTGGCCTTTGGATCTCTCTTCCAAGCCTTTCCTGACTTCCTCTTAGATCATAGATTGGACCTGG | |
| | TTTTGTTTTCCTGCAGCTGTTGACTTGTTGCCCTGAAGTACAATAAAAAAAATTCATTTTGCTCCAGTAA | |
| | AAAAAAAAAAAAAAAA | |
| CSDA | AGAAAAACTTGTGCGGGGCCATTTTTGGGGCAGTAAGATCGAGCGAGGAGCCCAAGAGCGAGCGCGCAGC | 19 |
| NM_003651.4 | ACGAAGCTCGAGCCGCCTCCGCCGCGCGACCCCACCTCGGCCGCCGCCGCCTGCGCCGCGAGATCCGCCC | |
| | CGGCCTCCCCGAGAGCGAGCCCCGGCCGCCGCGACCACCAGCCGCGCTAACCGCCGACCAACCGCCACCG | |
| | AGGCGCCTGAGCGAGAGCAGAGGAGGAGGAGGCATGAGTGAGGCGGGCGAGGCCACCACCACCACCACCA | |
| | CCACCCTCCCGCAGGCTCCGACGGAGGCGGCCGCCGCGGCTCCCCAGGACCCCGCGCCCAAGAGCCCGGT | |
| | GGGCAGCGGTGCGCCCCAGGCCGCGGCCCCGGCGCCCGCCGCCCACGTCGCAGGAAACCCCGGTGGGGAC | |
| | GCGGCCCCCGCAGCCACGGGCACCGCGGCCGCCGCCTCTTTAGCCACCGCCGCCGGCAGCGAAGACGCGG | |
| | AGAAAAAAGTTCTCGCCACCAAAGTCCTTGGCACTGTCAAATGGTTCAACGTCAGAAATGGATATGGATT | |
| | TATAAATCGAAATGACACCAAAGAAGATGTATTTGTACATCAGACTGCCATCAAGAAGAATAACCCACGG | |
| | AAATATCTGCGCAGTGTAGGAGATGGAGAAACTGTAGAGTTTGATGTGGTTGAAGGAGAGAAGGGTGCAG | |
| | AAGCTGCCAATGTGACTGGCCCGGATGGAGTTCCTGTGGAAGGGAGTCGTTACGCTGCAGATCGGCGCCG | |
| | TTACAGACGTGGCTACTATGGAAGGCGCCGTGGCCCTCCCCGGAATTACGCTGGGGAGGAGGAGGAGGAA | |
| | GGGAGCGGCAGCAGTGAAGGATTTGACCCCCCTGCCACTGATAGGCAGTTCTCTGGGGCCCGGAATCAGC | |
| | TGCGCCGCCCCCAGTATCGCCCTCAGTACCGGCAGCGGCGGTTCCCGCCTTACCACGTGGGACAGACCTT | |
| | TGACCGTCGCTCACGGGTCTTACCCCATCCCAACAGAATACAGGCTGGTGAGATTGGAGAGATGAAGGAT | |
| | GGAGTCCCAGAGGGAGCACAACTTCAGGGACCGGTTCATCGAAATCCAACTTACCGCCCAAGGTACCGTA | |
| | GCAGGGGACCTCCTCGCCCACGACCTGCCCCAGCAGTTGGAGAGGCTGAAGATAAAGAAAATCAGCAAGC | |
| | CACCAGTGGTCCAAACCAGCCGTCTGTTCGCCGTGGATACCGGCGTCCCTACAATTACCGGCGTCGCCCG | |
| | CGTCCTCCTAACGCTCCTTCACAAGATGGCAAAGAGGCCAAGGCAGGTGAAGCACCAACTGAGAACCCTG | |
| | CTCCACCCACCCAGCAGAGCAGTGCTGAGTAACACCAGGCTCCTCAGGCACCTTCACCATCGGCAGGTGA | |
| | CCTAAAGAATTAATGACCATTCAGAAATAAAGCAAAAAGCAGGCCACAACCTTAACCAACACCAAAGAAA | |
| | CATCCAAGCAATAAAGTGGAAGACTAACCAAGATTTGGACATTGGAATGTTTACTGTTATTCTTTAAGAA | |
| | ACAACTACAAAAAGAAAATGTCAACAAATTTTTCCAGCAAGCTGAGAACCTGGGAATTCCTGCACGGAAG | |
| | ACAAGAGAGTAGCCTCTCCAGTTTCAGCAACCGCTAGGTTTCTATTTTTTTTCCTGGTTTTTACTGTTTT | |
| | GGTAATATATATATTGAAACAAGAAATATTAATACCACATGGGGAGAACCCCAACCAAAGAAATCTGAAA | |
| | TATATAGTAAATGCTTTTTTTTCCGTTTTTGTTCATTTTGGATGCTGGTGCTAAACCTCCAAGTGTCATG | |
| | ATTTAAAAAAAAAAAAAATTTATGTCCTTCTTATTTATTTCTAGGATGAGGGGAGGATAACATTTTTGCT | |
| | TTCTTATGTGACTCTCTTTGAAAATGTGCAGTAAGAAATTCCTCAAAAATAAAATTTTTACCCTTCAGAG | |
| | GACAGAATGTTTAAAA | |
| FABP7 | GAGGATTGGGAGGAACTCGACCTACTCCGCTAACCCAGTGGCCTGAGCCAATCACAAAGAGGATTGGAGC | 20 |
| NM_001446.3 | CTCACTCGAGCGCTCCTTCCCTTCTCCTCTCTCTGTGACAGCCTCTTGGAAAGAGGGACACTGGAGGGGT | |
| | GTGTTTGCAATTTAAATCACTGGATTTTTGCCCACCCTCTTTCCAAATAAGAAGGCAGGAGCTGCTTGCT | |
| | GAGGTGTAAAGGGTCTTCTGAGCTGCAGTGGCAATTAGACCAGAAGATCCCCGCTCCTGTCTCTAAAGAG | |
| | GGGAAAGGGCAAGGATGGTGGAGGCTTTCTGTGCTACCTGGAAGCTGACCAACAGTCAGAACTTTGATGA | |
| | GTACATGAAGGCTCTAGGCGTGGGCTTTGCCACTAGGCAGGTGGGAAATGTGACCAAACCAACGGTAATT | |
| | ATCAGTCAAGAAGGAGACAAAGTGGTCATCAGGACTCTCAGCACATTCAAGAACACGGAGATTAGTTTCC | |
| | AGCTGGGAGAAGAGTTTGATGAAACCACTGCAGATGATAGAAACTGTAAGTCTGTTGTTAGCCTGGATGG | |
| | AGACAAACTTGTTCACATACAGAAATGGGATGGCAAAGAAACAAATTTTGTAAGAGAAATTAAGGATGGC | |
| | AAAATGGTTATGACCCTTACTTTTGGTGATGTGGTTGCTGTTCGCCACTATGAGAAGGCATAAAAATGTT | |
| | CCTGGTCGGGGCTTGGAAGAGCTCTTCAGTTTTTCTGTTTCCTCAAGTCTCAGTGCTATCCTATTACAAC | |
| | ATGGCTGATCATTAATTAGAAGGTTATCCTTGGTGTGGAGGTGGAAAATGGTGATTTAAAAACTTGTTAC | |
| | TCCAAGCAACTTGCCCAATTTTAATCTGAAAATTTATCATGTTTTATAATTTGAATTAAAGTTTTGTCCC | |
| | CCCCCCCCTTTTTTTTATAAACAAGTGAATACATTTTATAATTTCTTTTGGAATGTAAATCAAATTTGAA | |
| | TAAAAATCTTACACGTGAAAAAAAA | |
| HEXIM1 | ACCTGCTTCCCTCTCGGATAGCCAGGGCTGATGATTTCAACTCATTAATCATTCCGAACTCTTCCCAACA | 21 |
| NM_006460.2 | AACAGCCTCATGGCTGTCCCGGACCTCCTCTGTCCCGGCTCAGGAAATGATCTCGGTCGGAAGTGAAAAG | |
| | ACCAAATCGGCCCCAGGAGGCCATTTTCTTCGACAGAAGCTGAGGCGTGGGGGCGTGGCCTTCCCCCGCT | |
| | TCCCCCTCCACTCCCCCGCCCGCCCCCGGCCCCGGCTTTCCGATCTCGGCCCAGGGAAGAGCCTTGGTCG | |
| | CGAATCACCAGTTTGCATTTGCCCCTGGGGCGGGGGCGGCTTTCTGAGACCAGGCTGGGGCTGGGACTCC | |
| | GCCACCTTCAGCTAAGGGTACCGAGGTCAGTCCGGGAGTCGCGTCACCGGGACTCGAACCCGCCTCTTCG | |
| | TCTTCCGAGGCCTAGTGCGAGCCTGCGGCGCTAAACGCAGTCACACTGTCCCTTTAAGGCGGCACTTTTT | |
| | ATTCTTCATTTGTTTACTTCTTCATGCGCTCTTCGGTCTTTACAAAATGTGCTCGCGATATCCTTCCGCA | |
| | AGTGTCAGTCTCAGGCACTCACCACCCGCCTTGAAGCCATTTCTATAATCTTAAGACTCGCGAGTTAGCA | |
| | GCCGTGGGCCGACGTCTCTCTTTATAGGATTTAATTCTTTTACATTTTAGGGACTACTTTTTAGGAATAA | |
| | ACCATTCTTGCGTTAGTTAATAAAGGTTCATAACCTTCGGAACCCCTCCGCTGAGAACAAAATACGATAA | |
| | TAGCCTTTATAACGCACCTTTTCATAAAAATATTCTGTGAGGACTCTCATAGGCCATCGAATCTTCTCGT | |
| | ATTCCTGAAACAGAATGGTACGGTCCAGAACCCGCCCCATCTTCTCTGCGATTGGCCGTCCTTCCTCAGC | |
| | GAGTCGTGTGATTTTTCACCAATGGCCGCTCGCGTTTCTTTAGCGAGGTCTAAGCGATGGAAGGTGGCGG | |
| | CCAGGGAGACGCCCCCTACGCGTCCTGGGATTGGCTACGTCGCACGGCGCGCGAGGGCGGCGGGCCCGAA | |
| | AGATAAGAACTACGACTCCCGGCGCCCCGCAAAGGGAACTCCGTTACGCATGCGCACGGGCGGGGCGAAA | |
| | AAGCTTCTATATAAAAGGGGCGCAGAGGACTGGGAGACAGCAGTTGGAAGTTGGCAGGTGGAGAGGCAGG | |
| | TTGGGAGGGAAAGTCGGGGGAGGACGCGGAAGAGGAGCTGTGGGAAGGGGGAGGAGGGAGGGAGGAAAAG | |
| | AGGAGGAGGCGGAGGAGAACTGAGCAGAGCAGAGCATCGAGCCAAAGGGGAGATGAGTTTGTCTGTCCTC | |
| | TGCTGAGGCTACGGCCGGGCCTAGGGAACTGGGAGCTTGGGTGGAAGCGACACCCGTGGAAGTGGGAGGA | |
| | GGTGGCGCCGGGACTTTAACCCCTTGTGGGCTCTGCGGCAGGGGATTTAACCCTTTGTGGATCTGGCCCC | |
| | TCGGAGGCAGCGTCATCGGTAGTTTTAACCCCTTCGGGGCTGGGTTTCACGCACTGGACTTACCCTCATC | |
| | ACCTTGCTCACCAACTCCTTTATTGGGGTGCTCCGCTTGGAGGTTTGAGGCCCACCTCCGCCCATTACGT | |
| | ACTGTTCCTGCCGCTGCACCCCCTTGGACCCGCTAGCTGGCCGCACTGTGGGCGCTTAACCCTTTACTGA | |
| | CTTGAGCTCCCCAGATTGCAGTTGGAGTTTGCTGATAGAAGGACTAGCTAAAGGCGTCACTGCAGGAATT | |
| | ACAAACTGAAGAGGACTCTGTTGGACTGTTTTTTTTTTCTTTTTCTTTTTTTTAAGAAAAACCCATTTTT | |
| | TTCCTTAAGGACTTACTAGCCAAAATTTCTTAAACTTCGAGGACTCTACTAGCCATGGCCGAGCCATTCT | |
| | TGTCAGAATATCAACACCAGCCTCAAACTAGCAACTGTACAGGTGCTGCTGCTGTCCAGGAAGAGCTGAA | |
| | CCCTGAGCGCCCCCCAGGCGCGGAGGAGCGGGTGCCCGAGGAGGACAGTAGGTGGCAATCGAGAGCGTTC | |
| | CCCCAGTTGGGTGGCCGTCCGGGGCCGGAGGGGGAAGGGAGCCTGGAATCCCAACCACCTCCCTTGCAGA | |
| | CCCAGGCCTGTCCAGAATCTAGCTGCCTGAGAGAGGGCGAGAAGGGCCAGAATGGGGACGACTCGTCCGC | |
| | TGGCGGCGACTTCCCGCCGCCGGCAGAAGTGGAACCGACGCCCGAGGCCGAGCTGCTCGCCCAGCCTTGT | |
| | CATGACTCCGAGGCCAGTAAGTTGGGGGCTCCTGCCGCAGGGGGCGAAGAGGAGTGGGGACAGCAGCAGA | |
| | GACAGCTGGGGAAGAAAAAACATAGGAGACGCCCGTCCAAGAAGAAGCGGCATTGGAAACCGTACTACAA | |
| | GCTGACCTGGGAAGAGAAGAAAAAGTTCGACGAGAAACAGAGCCTTCGAGCTTCAAGGATCCGAGCCGAG | |
| | ATGTTCGCCAAGGGCCAGCCGGTCGCGCCCTATAACACCACGCAGTTCCTCATGGATGATCACGACCAGG | |
| | AGGAGCCGGATCTCAAAACCGGCCTGTACTCCAAGCGGGCCGCCGCCAAATCCGACGACACCAGCGATGA | |
| | CGACTTCATGGAAGAAGGGGGTGAGGAGGATGGGGGCAGCGATGGGATGGGAGGGGACGGCAGCGAGTTT | |
| | CTGCAGCGGGACTTCTCGGAGACGTACGAGCGGTACCACACGGAGAGCCTGCAGAACATGAGCAAGCAGG | |
| | AGCTCATCAAGGAGTACCTGGAACTGGAGAAGTGCCTCTCGCGCATGGAGGACGAGAACAACCGGCTGCG | |
| | GCTGGAGAGCAAGCGGCTGGGTGGCGACGACGCGCGTGTGCGGGAGCTGGAGCTGGAGCTGGACCGGCTG | |
| | CGCGCCGAGAACCTCCAGCTGCTGACCGAGAACGAACTGCACCGGCAGCAGGAGCGAGCGCCGCTTTCCA | |
| | AGTTTGGAGACTAGACTGAAACTTTTTTGGGGGAGGGGGCAAAGGGGACTTTTTACAGTGATGGAATGTA | |
| | ACATTATATACATGTGTATATAAGACAGTGGACCTTTTTATGACACATAATCAGAAGAGAAATCCCCCTG | |
| | GCTTTGGTTTCGTAAATTTAGCTATATGTAGCTTGCGTGCTTTCTCCTGTTCTTTTAATTATGTGAAACT | |
| | GAAGAGTTGCTTTTCTTGTTTTCCTTTTTAGAAGTTTTTTTCCTTAATGTGAAAGTAATTTGACCAAGTT | |
| | ATAATGCATTTTTGTTTTTAACAAATCCCCTCCTTAAACGGAGCTATAAGGTGGCCAAATCTGAGAACAA | |
| | TTAAATTCATTTTAGTTATAATAAATTTAATATTTGTAAATGTAACATAGTTTCAGTGTGATTTCTAGAG | |
| | CTAATTCAAAATAGTATTGATATATTTTATGTGACTGCATTTTTGGGGAGGGGTACCGAAATCGTTAAAT | |
| | TTGTCAGTTTGCAAAAATATCAATCTTTAATGGGAGAATTTTCAATTTGCCAATTTTTTCCTTGAATGGG | |
| | TTTAAGTATGCTACAATATACAGTTCAGGCAAAATTTAAGATGTAATTATCTTCAATACTTAAGTGTGCT | |
| | TGCTTTCTAGTGCCTTGGTTTTCTTTCTTGATGCTGGAAAAATAAACAAACCGGTATTGAGTGTTTAGGC | |
| | GAGTGGAAAGTGGCTACAATCCAAAATTTTAAATTTAACTCTGCCTCGGCCATTCAAAAGTCTAATAACA | |
| | AAAAATGTAAACCTAATTTGGCAGTTTGTTAGGTTAGACAACTGACAGCCTCATTTCATTCCTACAAGTT | |
| | GGTTTTCAGTAATCTCTTCCTTCCCCCCAGTAAGGCTGGAAGAGGCTCTTGGCAAACTTCTTAGTGCAAG | |
| | CAATGGTTAGATTAATTTGTGAGGCAGCTCTTTAAGACGTTCAGAGGTAAGAAATACTGGATTTATAAAG | |
| | CAAATGGCTGTTTGGGGGATTCCAAGGATTTACCTAATTGTCCAATTCTACGTGCTCTCTATACCAAAAC | |
| | AAAAAAAAAAAGCTATCCACCTTTCCATGTGGGTCAAACTAAAATTAGAAATGTCCCCTCACTGCAGATC | |
| | AAATGTAAAGCTTCCAGTTAAGGAGCTAAATGAGGTCCTCAGCTGAATGAGGAACCCTGTACATCCCCTT | |
| | GCACAGCCCTATTCTAAATCGCTTAAACTATGCTGATAGCTGCTTAGGTTCTTGAGTAGTTCTGCTCTTA | |
| | AACGTAGGGAGGCCCTGAGAACTAAATTTTGCCCCAAAATAAAAACAGAAATTATGAGATTGCCTCCTGT | |
| | CATTTTGGTTAACCCAGTCCTTCACCTGCCCTGTGTCAGTGTCTTCTGAGGGCAATTGCGTTGCTCAAAT | |
| | CACTAGCACAGAGGTTCCTTAATTTGGGGCCTTAGAAACCATTGTGGGCCTTGGGGTCCATGAACCCCAT | |
| | GAAATTATTTGTAGACTTGTATGTACATTTTTCTGGGGAGAAGGTTCAAGAGATTCATAAGATTGTCAAA | |
| | CTCCTTGAAGGTTCAGAACCTCTGCAGGGAAGGGGGAAGAAAACCCTCCCATTAGGAAGCATGCTTTTGC | |
| | AGTTAAATGGCGATGGTGGAGGTGATAGGGACTTCAAGAGTAAAATGCACCTTGTATTGCATAAGAAGCA | |
| | TACACAAATCAATAAATCAAGGGAGATTATACCAGTAGGACTGAATCAGGGCCTTCAAAGCTGGACTGAG | |
| | TTGGTCCTGTTCTGGCACATATGGTCCACTGGAGACAATGTATGATTGAGTTTTTCTTTGGTCTAAAAAT | |
| | TATATTAAACATTTATTTTGAAATA | |
| ID4 | GAGAGCGTAGTGGAGGAGGCGCGGTTGTGAGTAGTACCGGGAGTGGGGTGATCCCGGGCTAGGGGAGCGC | 22 |
| NM_001546.3 | GGCGGCCGCGATCGGGCTTAGTCGGAGCTCCGAAGGGAGTGACTAGGACACCCGGGTGGGCTACTTTTCT | |
| | TCCGGTGCTTTTGCTTTTTTTTTCCTTTGGGCTCGGGCTGAGTGTCGCCCACTGAGCAAAGATTCCCTCG | |
| | TAAAACCCAGAGCGACCCTCCCGTCAATTGTTGGGCTCGGGAGTGTCGCGGTGCCCCGAGCGCGCCGGGC | |
| | GCGGAGGCAAAGGGAGCGGAGCCGGCCGCGGACGGGGCCCGGAGCTTGCCTGCCTCCCTCGCTCGCCCCA | |
| | GCGGGTTCGCTCGCGTAGAGCGCAGGGCGCGCGCGATGAAGGCGGTGAGCCCGGTGCGCCCCTCGGGCCG | |
| | CAAGGCGCCGTCGGGCTGCGGCGGCGGGGAGCTGGCGCTGCGCTGCCTGGCCGAGCACGGCCACAGCCTG | |
| | GGTGGCTCCGCAGCCGCGGCGGCGGCGGCGGCGGCAGCGCGCTGTAAGGCGGCCGAGGCGGCGGCCGACG | |
| | AGCCGGCGCTGTGCCTGCAGTGCGATATGAACGACTGCTATAGCCGCCTGCGGAGGCTGGTGCCCACCAT | |
| | CCCGCCCAACAAGAAAGTCAGCAAAGTGGAGATCCTGCAGCACGTTATCGACTACATCCTGGACCTGCAG | |
| | CTGGCGCTGGAGACGCACCCGGCCCTGCTGAGGCAGCCACCACCGCCCGCGCCGCCACACCACCCGGCCG | |
| | GGACCTGTCCAGCCGCGCCGCCGCGGACCCCGCTCACTGCGCTCAACACCGACCCGGCCGGCGCGGTGAA | |
| | CAAGCAGGGCGACAGCATTCTGTGCCGCTGAGCCGCGCTGTCCAGGTGTGCGGCCGCCTGAGCCCGAGCC | |
| | AGGAGCACTAGAGAGGGAGGGGGAAGAGCAGAAGTTAGAGAAAAAAAGCCACCGGAGGAAAGGAAAAAAC | |
| | ATCGGCCAACCTAGAAACGTTTTCATTCGTCATTCCAAGAGAGAGAGAGGAAAGAAAAATACAACTTTCA | |
| | TTCTTTCTTTGCACGTTCATAAACATTCTACATACGTATTCTCTTTTGTCTCTTCATTTATAACTGCTGT | |
| | GAATTGTACATTTCTGTGTTTTTTGGAGGTGCAGTTAAACTTTTAAGCTTAAGTGTGACAGGACTGATAA | |
| | ATAGAAGATCAAGAGTAGATCCGACTTTAGAAGCCTACTTTGTGACCAAGGAGCTCAATTTTTGTTTTGA | |
| | AGCTTTACTAATCTACCAGAGCATTGTAGATATTTTTTTTTTACATCTATTGTTTAAAATAGATGATTAT | |
| | AACGGGGCAGAGAACTTTCTTTTCTCTGCAAGAATGTTACATATTGTATAGATAAATGAGTGACATTTCA | |
| | TACCATGTATATATAGAGATGTTCTATAAGTGTGAGAAAGTATATGCTTTAATAGATACTGTAATTATAA | |
| | GATATTTTTAATTAAATATTTTTTTGTAAATATTATGTGTGTGTTTTTTTTTAATCTATGGGAATATTTC | |
| | TTTTGGAAAATCATTTTTCAGCTCAATTACAGAGCTCTTGATATCTTGAATGTCTTTTCTGTTTGGCCTG | |
| | GCTCTTAATTTGCTTTTGTTTTGCCCAGTATAGACTCGGAAGTAACAGTTATAGCTAGTGGTCTTGCATG | |
| | ATTGCATGAGATGTTTAATCACAAATTAAACTTGTTCTGAGTCCATTCAAATGTGTTTTTTTAAATGTAG | |
| | ATTGAAATCTTTGTATTTGAAGCATACATGTTGAAAATACACCTTATCAGTTTTTAAGTACAGGGTTTTA | |
| | TAGTGTAATATATACAGAGTAAGTGTTTGTTTTTGTTTTTCAACTGAGGTCAAAATGGATTCTGAATGAT | |
| | TTTGCATATGGGATGAGGAAATGCTTGGATCCTTAAGGAGTTTACGAAATCTGCTGTTTTATCAAAGTGA | |
| | AAAAAAATTGCTTATTACTCTTCATTTTACACTAAAGCTTAATGTCACTAAGTTTCATGTCTGTACAGAT | |
| | TATTTAAATCATGGAAATGAAAAAAATGTTCTCTGCTTGCTACCAAAGGACAAACTCTTGGAAATGAACA | |
| | CTTTCTGCTTTCCTTCCTCCAAAGAATTAATAGGCAACAGTGGGAGAAAAAAAAGGCATAATGGCAAATC | |
| | CTTCAAGCAGGGATAAAAGTCGATCTTCAAACATTAACTTAAGCAGACCAAAAATTCTGATGACCGCATC | |
| | TAGATTATTTTTTTATAAAAATGATTTTCACTATAGCTATGTTACGCTAAGCTACTGTCCAATCTCTTGT | |
| | GATGTGTAACTTTTACATGTGAATATTAAAGTAGATTTCTCTGTCTTGTACTGTGATTTCTGGTCTCATT | |
| | TCTTTAAAACCTTACTCTTATTTTTCTTTTAAGGCTCTTTTTTCTCCTTAAGGAAGGTAATATTTTCTAG | |
| | GTTAGATAGGACTATCAGGGTTTGTGAACATTATGCATTTAATGTTATGGGTACTTTACACACAAGTTAG | |
| | ATGGAATTTTTAGAGTGAAAGAATTAAGTAGGATTTAATTGGGTGCTTTGTAAATAGTCAACTGTGTGTA | |
| | TAACGTGGTCTGTTTGATTTTTAAAAGGAAAGGATTTGTTTCAGATTATACAAGAATAAAAGTATTATAG | |
| | ACCCAAGGGACTTCTTATGAGGTCAAATTCAGATATTTATATGAATATGAAATACCATGGTCCCTAGTAG | |
| | TCAGTTGAAGTGGCAATGTCTAAACAGAAATGAACAAAACTAATGCTAGCAGGTTAAAATCAATCAAAAT | |
| | GTTTAAAAATTGATTCTGTCCTCAGCATGTTATTTCCTCAGCTCTGATAATTTACTGGTCTTGAGTATTT | |
| | TGAGAATTTGATGTTGAACGTTATAAAGTCAAAGAACTGCTTGTTTAGATGAGGTTTATTTTTATTTTTG | |
| | ATATTATTCATTCTTGTCACACATCAAGAAGAAAACACTAGAGTGCTGCTGGAATTCCAAATCTGAAGAA | |
| | TTCTAACGACTGCATTCTTTGTTATTAAAAAGGGCACAATCCTTCCTTTTTATTTGGCAGTTTAATTTCA | |
| | GTAGGAAGCATGTCACATGTGCACTGTTGGTTAGAATTATGCATCTGTCATGCCTGACTGCTGAACCCTA | |
| | CCTAAGCCTTTTGGCGCAGTTTAAAACTTATACTGGTGGACTGTGAACCTCAAAACAAATGGGTATTTTT | |
| | GGGTTTTGAGGATAGATGTTACTCCTTAAAGTTTGTATTTGGGGCATGAAAAACTACTGAAAGAAGAAAA | |
| | GTGCTACAGATACTACATTTCAAAGAGTTGGCATTTTCCCTTTGGCCACTCAAGCAGCATTTGATGTATC | |
| | TAAAGAAACAAAGTCATTGTTTATTTTTTAAAAAATTATATGCAGTTGTACAAGATACTACATTCCATTG | |
| | AAATGTTGGCTATGTCCTAACCAGGCAACCAGATAACAAAAACATTTTGAGTCTTTTATCTAGGTAGTTC | |
| | TAATTATTCAGCTACTTAGTTTAACAAAGGAAAATATCCTGACTTCTCTCATTTCATTTGTAGACTTTTC | |
| | ATTGTATAGGCACAACCAAAGAGTCAGACTGGTTTAAAACTCCAGAAGGAAAAAAAGTATCCCACACAGT | |
| | GGATGTTGTTTCTAAGAATGCTACAAAATCCTGACATCTCAGACATCTCAATGTTAAAGGAAGAAAAAAA | |
| | ATACCTTTTCATTTCAAAGAACTAATATACTTTGATATTGTGTAAACCTTACTCAAGTTTATTGTCAAGC | |
| | TTTAACTGCCTTTTTAGAACTTTTTAAAATTTCGAGCCCACAAATCTATTGTATTAGTTGCCTTCTATAA | |
| | CAATAAATCTTCACTGAGCAAAAGGCAAAAAAAAAAAAAAA | |
| IGBP1 | GGATCTTCAAACCGTGGGAGTGGTGCGGCGGCTAGAGTCCCTGGACTCCTCAACCTAGGGAGCTACTCGC | 23 |
| NM_001551.2 | GAGATGCCTACGACTTGTAACGGGCTGCCTGGTAAAATGAGTCTATGGAAACGGTTGCCAGGGCCGGCTA | |
| | ACAGCGGCTCCCGGAAGTCCTTTGATGCTTTGTTAACAGTGAAGCTACTGGACCAATGAGGTGCTTCTTC | |
| | CGGTTTTGTCCGCGCTCGCCTAATTCTTCTTTATCAAGGTTGCCTTTGACCCCGGAAAAGAGATCTTCCG | |
| | GGTTCCTCTCTCCCCAAGATGGCTGCTGAGGACGAGTTACAGCTGCCGCGGCTCCCCGAGCTGTTCGAAA | |
| | CTGGTAGACAGTTACTGGACGAAGTAGAAGTGGCGACTGAACCCGCCGGTTCCCGGATAGTCCAGGAGAA | |
| | GGTGTTCAAGGGCTTGGACCTCCTTGAGAAGGCTGCCGAAATGTTATCGCAGCTCGACTTGTTCAGCCGA | |
| | AATGAAGATTTGGAAGAGATTGCTTCCACCGACCTGAAGTACCTTTTGGTGCCAGCGTTTCAAGGAGCCC | |
| | TCACCATGAAACAAGTCAACCCCAGCAAGCGTCTAGATCATTTGCAGCGGGCTCGAGAACACTTTATAAA | |
| | CTACTTAACTCAGTGCCATTGCTATCATGTGGCAGAGTTTGAGCTGCCCAAAACCATGAACAACTCTGCT | |
| | GAAAATCACACTGCCAATTCCTCCATGGCTTATCCTAGTCTCGTTGCTATGGCATCTCAAAGACAGGCTA | |
| | AAATACAGAGATACAAGCAGAAGAAGGAGTTGGAGCATAGGTTGTCTGCAATGAAATCTGCTGTGGAAAG | |
| | TGGTCAAGCAGATGATGAGCGTGTTCGTGAATATTATCTTCTTCACCTTCAGAGGTGGATTGATATCAGC | |
| | TTAGAAGAGATTGAGAGCATTGACCAGGAAATAAAGATCCTGAGAGAAAGAGACTCTTCAAGAGAGGCAT | |
| | CAACTTCTAACTCATCTCGCCAGGAGAGGCCTCCAGTGAAACCCTTCATTCTCACTCGGAACATGGCTCA | |
| | AGCCAAAGTATTTGGAGCTGGTTATCCAAGTCTGCCAACTATGACGGTGAGTGACTGGTATGAGCAACAT | |
| | CGGAAATATGGAGCATTACCGGATCAGGGAATAGCCAAGGCAGCACCAGAGGAATTCAGAAAAGCAGCTC | |
| | AGCAACAGGAAGAACAAGAAGAAAAGGAGGAAGAGGATGATGAACAAACACTCCACAGAGCCCGGGAGTG | |
| | GGATGACTGGAAGGACACCCATCCTAGGGGCTATGGGAACCGACAGAACATGGGCTGATCTTCCCACAAC | |
| | ACCACAGGACTGCAGGGTGCACAACTCCCCTGCCAAGGAAAACCATGCAGTCCTCCCCTCCCTGGTCTCC | |
| | TGCTTCAGCTCTGTACAACGAGGGCAAAGATGCTAAATCTTGCTTTGCATTCAGTAAAGTGTCAAGTGAT | |
| | TAAGTGTGTATTTGTACCCTAGATGATATGAACCAGCAGTCTTGTTTTGGCATCATCCTCATCATGTTGT | |
| | ATTCCAGCTTCTTAAGTGGAAGGAAAAGAGTGCTGAGAAATGGCTCTGTATAATCTATGGCTATCCGAAT | |
| | TCTCTGAAAAAATAATAAAAGTCCCCTCTATTATATGAGCCTGTACAGAAAAAAAAAAAAAAAAAAAAA | |
| INPP4B | GAAGCCAGAGGCTGGGGGAGCTGCTGGAGCCTCGCGAAGCCGCGGCCGGCGCCCTGCGCCGTCGCCGCCG | 24 |
| NM_003866.2 | CCTGCTAGTTTCCTCCGGGTTCTCAGCCCCGGGTACTGAGGCTTCGGTCTATAAATAGCAGGTTACAGCT | |
| | CCTCCTGGGCGCGCACACGCTCACACGCTCGCAAGCGAACGCAGGAAAGTCAGGCTAAAAGTGTCTGCTG | |
| | CTGCTGCCGCCCCCCACTCCGCCTCCGGGAGAGAATACAAAGAAATGGTGTTACCTGGCAAGAGGTCTTC | |
| | TGTCTTTTATGAAAAATTAGACAAAGGCTTTACAGGAGGCATAGTACTGGAAATCTGCTCCTGATGAGGT | |
| | CTCAGAAAGCTTCCACTCGTGGTGGAAGGCAAAGGAGGAGCAGGCACATCACATGAGCCTTGAAACCAGC | |
| | GAAACAATAATCAAAGAGCAGTTCTGTCAAAGAAAACAACATAAATCAGGTACAGAATTTCAGAGTGGGA | |
| | TATCAGATCTTTAGTGTGAAGATACATCTACATTAAACCAGGAATCACTAGAACTGACATTTGGACAAGA | |
| | AAATTTGGAAAATTTTAAAACTGTGAAGGTTGATCATGGAAATTAAAGAGGAAGGGGCATCAGAAGAAGG | |
| | GCAGCACTTTCTTCCTACAGCCCAGGCCAATGATCCCGGGGACTGTCAGTTCACAAGTATCCAGAAGACT | |
| | CCAAATGAACCGCAGTTGGAATTCATCCTTGCATGCAAGGATCTCGTGGCTCCTGTCCGTGATCGTAAAC | |
| | TGAATACACTGGTGCAGATCTCCGTAATCCACCCCGTGGAGCAGAGTCTGACAAGATACTCCAGCACCGA | |
| | AATTGTGGAGGGAACAAGGGACCCACTGTTTTTGACTGGTGTCACATTCCCATCTGAGTATCCCATCTAT | |
| | GAGGAGACCAAAATAAAACTAACAGTCTATGATGTCAAGGATAAGTCTCATGACACCGTTCGAACCAGTG | |
| | TCCTACCAGAACATAAGGATCCCCCGCCAGAAGTTGGGCGAAGTTTCTTGGGCTATGCCAGTTTTAAAGT | |
| | GGGAGAGCTGCTGAAGTCAAAGGAGCAATTGCTGGTCCTGAGCCTGAGAACTTCAGATGGTGGCAAAGTG | |
| | GTTGGCACCATAGAAGTCAGTGTCGTGAAGATGGGGGAGATTGAGGATGGGGAAGCCGACCACATCACCA | |
| | CAGATGTACAGGGACAAAAGTGTGCCCTGGTATGTGAATGTACAGCCCCGGAAAGTGTGAGCGGAAAAGA | |
| | TAACTTACCTTTTTTGAATTCAGTGTTAAAGAACCCAGTATGTAAATTATATAGATTTCCCACATCTGAC | |
| | AATAAGTGGATGCGAATTCGAGAGCAGATGTCAGAGAGCATTCTTTCCTTTCATATTCCTAAGGAATTGA | |
| | TTTCCCTTCACATTAAAGAAGATTTGTGCAGAAACCAGGAGATAAAAGAACTTGGTGAGCTTTCTCCACA | |
| | TTGGGACAATCTGCGAAAAAATGTCCTTACTCACTGTGATCAAATGGTGAATATGTACCAAGACATTCTG | |
| | ACAGAACTTAGCAAGGAAACAGGGTCCTCTTTCAAATCAAGCAGCAGCAAAGGAGAGAAAACATTAGAAT | |
| | TTGTTCCAATAAATCTACATCTGCAAAGAATGCAGGTACACAGCCCTCACTTGAAAGATGCTCTCTACGA | |
| | TGTCATCACTGTGGGAGCCCCAGCTGCCCATTTTCAGGGATTTAAGAATGGTGGTCTTCGGAAGCTACTC | |
| | CATAGATTTGAAACAGAAAGAAGAAATACCGGATACCAGTTTATTTACTATTCACCTGAAAACACAGCCA | |
| | AAGCAAAGGAAGTTCTCAGCAACATCAATCAACTACAACCTCTTATAGCAACCCATGCAGACCTACTGCT | |
| | TAATTCTGCAAGCCAGCATTCTCCAGACAGCTTGAAGAATTCTTTAAAGATGCTTTCAGAAAAAACAGAG | |
| | CTTTTTGTACATGCCTTCAAGGATCAACTTGTCAGGAGTGCTCTTTTAGCACTCTACACTGCAAGGCCAG | |
| | GAGGCATTCTTAAGAAGCCACCCTCTCCTAAGAGCAGCACAGAGGAGAGCAGTCCCCAAGACCAACCCCC | |
| | AGTGATGAGAGGGCAGGACTCCATACCACATCATTCAGACTATGATGAGGAAGAGTGGGACAGGGTGTGG | |
| | GCCAATGTGGGGAAGAGCCTGAACTGCATTATTGCTATGGTGGACAAACTGATTGAAAGAGATGGTGGCA | |
| | GTGAAGGCAGTGGCGGCAACAATGATGGAGAAAAGGAACCTTCATTAACAGATGCCATTCCCTCTCACCC | |
| | AAGAGAGGACTGGTATGAACAGTTGTATCCCCTCATCCTTACCCTGAAGGACTGCATGGGAGAAGTGGTG | |
| | AACCGAGCCAAGCAGTCCCTGACATTTGTGCTCCTTCAGGAACTTGCGTACAGCTTGCCCCAGTGTCTGA | |
| | TGCTGACGCTAAGAAGAGACATCGTCTTCAGCCAAGCACTTGCTGGATTGGTTTGTGGTTTTATCATCAA | |
| | ATTACAGACAAGTCTGTATGACCCAGGCTTCCTACAGCAGCTTCACACAGTGGGGTTGATAGTACAATAT | |
| | GAAGGACTGCTAAGTACATACAGCGATGAAATTGGAATGCTAGAGGACATGGCCGTTGGCATTTCCGATT | |
| | TAAAGAAAGTTGCATTTAAAATAATTGAAGCCAAATCCAATGATGTGTTGCCAGTTATAACAGGAAGACG | |
| | AGAACATTACGTGGTAGAGGTCAAGCTTCCAGCCAGAATGTTTGAGTCACTACCTCTACAGATTAAAGAA | |
| | GGACAGTTGCTTCATGTGTATCCAGTACTTTTTAATGTTGGAATCAATGAACAGCAAACTCTGGCTGAAA | |
| | GGTTTGGAGATGTCTCTTTGCAAGAAAGTATTAATCAGGAAAACTTCGAACTTCTACAAGAATATTACAA | |
| | GATATTTATGGAAAAGATGCCTCCTGATTATATTTCACATTTTCAGGAACAAAATGATTTAAAAGCATTG | |
| | CTAGAAAATCTCCTTCAAAATATCCAATCCAAAAAAAGAAAGAATGTAGAAATTATGTGGCTGGCTGCAA | |
| | CGATTTGCCGCAAACTGAATGGTATTCGTTTCACCTGTTGTAAAAGTGCCAAAGACAGGACATCGATGTC | |
| | AGTGACACTTGAACAATGCTCAATCTTGAGAGATGAGCACCAGTTACACAAGGACTTCTTTATCCGAGCG | |
| | CTGGATTGCATGAGAAGAGAAGGATGCCGCATAGAGAATGTACTGAAGAATATCAAATGCAGAAAGTATG | |
| | CTTTCAACATGCTACAGCTGATGGCTTTCCCCAAGTACTACAGACCTCCAGAGGGGACTTATGGAAAAGC | |
| | TGACACCTAAGTTTACCAACATGTTAATAAACAGGAACACAAATACATTTCAGTTGGATAATCTTCACCT | |
| | TGGTCTTTTTTGTTTGTTTTTATTGTCATGAATTTGTGGTGGGGGAGATGATCACAGATGTTTCCCAAAA | |
| | TCTAGGAACTACTTCAATTCATCATCAGCATATTGCTCTGAAAGAAATCCATTTTAAAAAATCTTACATG | |
| | ATTCAGTACTGTCATTTCTAGTTCTAAGCTTCTATGTGTTGAGCCTAGCTGATTGAGATTGGTTCACAAA | |
| | GTGTAAATTTCATTCATGAGTATTTAAATGTTTCTGAGGAAACATGGATCATTTCAATAGGACTAGGGGT | |
| | GATTCACAGAGCACCACTCTCCAACCAAATGGAAGAGAGGAGAGGGGGAAAAGGAACATATTTTTTTTGT | |
| | GATACAACTTAATAGCCTATGAGAACACAGTCAACCTGAGAATCAATGTAAGGGATTTAAAAAAAATGTG | |
| | TAGCCACTCAATTAGGTAGAGTTAACTCATGATCTGGAATACTGAGGCAGTTTGCAGGTATGTTCCACAA | |
| | TGATCTCTATCATCCAGTCAAGGTGTGACTCCTCCCTTGCAACAGGCATATGCATGGAGTGAGTAAAGTG | |
| | GTCAACAGACCTTTCAAAACCATGGCATCTTTTCAGAACTCTGACTTGGGTTGTGTGATCTAGCTGTGAA | |
| | TGTAGCAATATAGAACGTTTAATAGAATGATAAGCAAAACACTGCAATGATCTAAAATTACAAAAAAAAA | |
| | AAAAAAAAAA | |
| SLC5A6 | GCGTCAGGCCCTCTTCCCCGGGCGTGGCCTAAGCGGCCCGGTCCAGTCGCCCTGGGGCTGCTTGGGGGCT | 25 |
| NM_021095.2 | TTTCCTGCTCGTGGAGCTCTGCGCTGGTCTTCATGCGCCCTAGCCCTCTTTCGGGGATACTGGCCGACCC | |
| | CCTCTTCCTTTTCCCCTTTAGTGAAGGCCTCCCCCGTCGCCGCGCGGCTTCCCGGAGCCGACTGCAGACT | |
| | CCCTCAGCCCGGTGTTCCCCGCGTCCGGACGCCGAGGTCGCGGCTTCGCAGAAACTCGGGCCCCTCCATC | |
| | CGCCCTCAGAAAAGGGAGCGATGTTGATCTCAGGAAGCACAAAGGGACCTTCCTAGCTCTGACTGAACCA | |
| | CGGAGCTCACCCTGGACAGTATCACTCCGTGGAGGAAGACTGTGAGACTGTGGCTGGAAGCCAGATTGTA | |
| | GCCACACATCCGCCCCTGCCCTACCCCAGAGCCCTGGAGCAGCAACTGGCTGCAGATCACAGACACAGTG | |
| | AGGATATGAGTGTAGGGGTGAGCACCTCAGCCCCTCTTTCCCCAACCTCGGGCACAAGCGTGGGCATGTC | |
| | TACCTTCTCCATCATGGACTATGTGGTGTTCGTCCTGCTGCTGGTTCTCTCTCTTGCCATTGGGCTCTAC | |
| | CATGCTTGTCGTGGCTGGGGCCGGCATACTGTTGGTGAGCTGCTGATGGCGGACCGCAAAATGGGCTGCC | |
| | TTCCGGTGGCACTGTCCCTGCTGGCCACCTTCCAGTCAGCCGTGGCCATCCTGGGTGTGCCGTCAGAGAT | |
| | CTACCGATTTGGGACCCAATATTGGTTCCTGGGCTGCTGCTACTTTCTGGGGCTGCTGATACCTGCACAC | |
| | ATCTTCATCCCCGTTTTCTACCGCCTGCATCTCACCAGTGCCTATGAGTACCTGGAGCTTCGATTCAATA | |
| | AAACTGTGCGAGTGTGTGGAACTGTGACCTTCATCTTTCAGATGGTGATCTACATGGGAGTTGTGCTCTA | |
| | TGCTCCGTCATTGGCTCTCAATGCAGTGACTGGCTTTGATCTGTGGCTGTCCGTGCTGGCCCTGGGCATT | |
| | GTCTGTACCGTCTATACAGCTCTGGGTGGGCTGAAGGCCGTCATCTGGACAGATGTGTTCCAGACACTGG | |
| | TCATGTTCCTCGGGCAGCTGGCAGTTATCATCGTGGGGTCAGCCAAGGTGGGCGGCTTGGGGCGTGTGTG | |
| | GGCCGTGGCTTCCCAGCACGGCCGCATCTCTGGGTTTGAGCTGGATCCAGACCCCTTTGTGCGGCACACC | |
| | TTCTGGACCTTGGCCTTCGGGGGTGTCTTCATGATGCTCTCCTTATACGGGGTGAACCAGGCTCAGGTGC | |
| | AGCGGTACCTCAGTTCCCGCACGGAGAAGGCTGCTGTGCTCTCCTGTTATGCAGTGTTCCCCTTCCAGCA | |
| | GGTGTCCCTCTGCGTGGGCTGCCTCATTGGCCTGGTCATGTTCGCGTATTACCAGGAGTATCCCATGAGC | |
| | ATTCAGCAGGCTCAGGCAGCCCCAGACCAGTTCGTCCTGTACTTTGTGATGGATCTCCTGAAGGGCCTGC | |
| | CAGGCCTGCCAGGGCTCTTCATTGCCTGCCTCTTCAGCGGCTCTCTCAGCACTATATCCTCTGCTTTTAA | |
| | TTCATTGGCAACTGTTACGATGGAAGACCTGATTCGACCTTGGTTCCCTGAGTTCTCTGAAGCCCGGGCC | |
| | ATCATGCTTTCCAGAGGCCTTGCCTTTGGCTATGGGCTGCTTTGTCTAGGAATGGCCTATATTTCCTCCC | |
| | AGATGGGACCTGTGCTGCAGGCAGCAATCAGCATCTTTGGCATGGTTGGGGGACCGCTGCTGGGACTCTT | |
| | CTGCCTTGGAATGTTCTTTCCATGTGCTAACCCTCCTGGTGCTGTTGTGGGCCTGTTGGCTGGGCTCGTC | |
| | ATGGCCTTCTGGATTGGCATCGGGAGCATCGTGACCAGCATGGGCTCCAGCATGCCACCCTCTCCCTCTA | |
| | ATGGGTCCAGCTTCTCCCTGCCCACCAATCTAACCGTTGCCACTGTGACCACACTGATGCCCTTGACTAC | |
| | CTTCTCCAAGCCCACAGGGCTGCAGCGGTTCTATTCCTTGTCTTACTTATGGTACAGTGCTCACAACTCC | |
| | ACCACAGTGATTGTGGTGGGCCTGATTGTCAGTCTACTCACTGGGAGAATGCGAGGCCGGTCCCTGAACC | |
| | CTGCAACCATTTACCCAGTGTTGCCAAAGCTCCTGTCCCTCCTTCCGTTGTCCTGTCAGAAGCGGCTCCA | |
| | CTGCAGGAGCTACGGCCAGGACCACCTCGACACTGGCCTGTTTCCTGAGAAGCCGAGGAATGGTGTGCTG | |
| | GGGGACAGCAGAGACAAGGAGGCCATGGCCCTGGATGGCACAGCCTATCAGGGGAGCAGCTCCACCTGCA | |
| | TCCTCCAGGAGACCTCCCTGTGATGTTGACTCAGGACCCCGCCTCTGTCCTCACTGTGCCAGGCCATAGC | |
| | CAGAGGCCACCCTGTAGTACAGGGATGAGTCTTGGTGTGTTCTGCAGGGACAGGCCTGGATGATCTAGCT | |
| | CATACCAAAGGACCTTGTTCTGAGAGGTTCTTGCCTGCAGGAGAAGCTGTCACATCTCAAGCATGTGAGG | |
| | CACCGTTTTTCTCGTCGCTTGCCAATCTGTTTTTTAAAGGATCAGGCTCGTAGGGAGCAGGATCATGCCA | |
| | GAAATAGGGATGGAAGTGCATCCTCTGGGAAAAAGATAATGGCTTCTGATTCAACATAGCCATAGTCCTT | |
| | TGAAGTAAGTGGCTAGAAACAGCACTCTGGTTATAATTGCCCCAGGGCCTGATTCAGGACTGACTCTCCA | |
| | CCATAAAACTGGAAGCTGCTTCCCCTGTAGTCCCCATTTCAGTACCAGTTCTGCCAGCCACAGTGAGCCC | |
| | CTATTATTACTTTCAGATTGTCTGTGACACTCAAGCCCCTCTCATTTTTATCTGTCTACCTCCATTCTGA | |
| | AGAGGGAGGTTTTGGTGTCCCTGGTCCTCTGGGAATAGAAGATCCATTTGTCTTTGTGTAGAGCAAGCAC | |
| | GTTTTCCACCTCACTGTCTCCATCCTCCACCTCTGAGATGGACACTTAAGAGACGGGGCAAATGTGGATC | |
| | CAAGAAACCAGGGCCATGACCGGGTCCACTGTGGAGCAGCCATCTATCTACCTGACTCCTGAGCCAGGCT | |
| | GCCGTGGTGTCATTTCTGTCATCCGTGCTCTGTTTCCTTTTGGAGTTTCTTCTCCACATTATCTTTGTTC | |
| | CTGGGGAATAAAAACTACCATTGGACCTAGAAAAAAAAAAAAAAAAAAAAAA | |
| TMSB10 | GCGGGCGCCGCTCTTTTGTTTCTTGCTGCAGCAACGCGAGTGGGAGCACCAGGATCTCGGGCTCGGAACG | 26 |
| NM_021103.3 | AGACTGCACGGATTGTTTTAAGAAAATGGCAGACAAACCAGACATGGGGGAAATCGCCAGCTTCGATAAG | |
| | GCCAAGCTGAAGAAAACGGAGACGCAGGAGAAGAACACCCTGCCGACCAAAGAGACCATTGAGCAGGAGA | |
| | AGCGGAGTGAAATTTCCTAAGATCCTGGAGGATTTCCTACCCCCGTCCTCTTCGAGACCCCAGTCGTGAT | |
| | GTGGAGGAAGAGCCACCTGCAAGATGGACACGAGCCACAAGCTGCACTGTGAACCTGGGCACTCCGCGCC | |
| | GATGCCACCGGCCTGTGGGTCTCTGAAGGGACCCCCCCCCAATCGGACTGCCAAATTCTCCGGTTTGCCC | |
| | CGGGATATTATAGAAAATTATTTGTATGAATAATGAAAATAAAACACACCTCGTGGCATGGC | |
| WWP1 | GGCTGCTGGCGGCCTGGGCTGCCGGGGCCGACGCCTGGGTGGCTGCTGCCGCCGCGCCTGCTGCGAGATG | 27 |
| NM_007013.3 | GCGATCTTGGGCGCGGAAGGGTGAGGGCGCCCGCCGCAGGAGGAGGTGCCGCTGCCGTGGCCGCCCGGCT | |
| | GCCGGGAGCCGACAGCTTCGCGCCGGGGTTGTCTCCTCACAGACTATGAGCTCCTTGAAAGAGGGAATCG | |
| | TGTCTTACTCATCTTTGTATCCCCAGTGTCTAGCAGTTCCTGATACATAGTTTTAGCTGAATTTTGGGAC | |
| | ATGGCCACTGCTTCACCAAGGTCTGATACTAGTAATAACCACAGTGGAAGGTTGCAGTTACAGGTAACTG | |
| | TTTCTAGTGCCAAACTTAAAAGAAAAAAGAACTGGTTCGGAACAGCAATATATACAGAAGTAGTTGTAGA | |
| | TGGAGAAATTACGAAAACAGCAAAATCCAGTAGTTCTTCTAATCCAAAATGGGATGAACAGCTAACTGTA | |
| | AATGTTACGCCACAGACTACATTGGAATTTCAAGTTTGGAGCCATCGCACTTTAAAAGCAGATGCTTTAT | |
| | TAGGAAAAGCAACGATAGATTTGAAACAAGCTCTGTTGATACACAATAGAAAATTGGAAAGAGTGAAAGA | |
| | ACAATTAAAACTTTCCTTGGAAAACAAGAATGGCATAGCACAAACTGGTGAATTGACAGTTGTGCTTGAT | |
| | GGATTGGTGATTGAGCAAGAAAATATAACAAACTGCAGCTCATCTCCAACCATAGAAATACAGGAAAATG | |
| | GTGATGCCTTACATGAAAATGGAGAGCCTTCAGCAAGGACAACTGCCAGGTTGGCTGTTGAAGGCACGAA | |
| | TGGAATAGATAATCATGTACCTACAAGCACTCTAGTCCAAAACTCATGCTGCTCGTATGTAGTTAATGGA | |
| | GACAACACACCTTCATCTCCGTCTCAGGTTGCTGCCAGACCCAAAAATACACCAGCTCCAAAACCACTCG | |
| | CATCTGAGCCTGCCGATGACACTGTTAATGGAGAATCATCCTCATTTGCACCAACTGATAATGCGTCTGT | |
| | CACGGGTACTCCAGTAGTGTCTGAAGAAAATGCCTTGTCTCCAAATTGCACTAGTACTACTGTTGAAGAT | |
| | CCTCCAGTTCAAGAAATACTGACTTCCTCAGAAAACAATGAATGTATTCCTTCTACCAGTGCAGAATTGG | |
| | AATCTGAAGCTAGAAGTATATTAGAGCCTGACACCTCTAATTCTAGAAGTAGTTCTGCTTTTGAAGCAGC | |
| | CAAATCAAGACAGCCAGATGGGTGTATGGATCCTGTACGGCAGCAGTCTGGGAATGCCAACACAGAAACC | |
| | TTGCCATCAGGGTGGGAACAAAGAAAAGATCCTCATGGTAGAACCTATTATGTGGATCATAATACTCGAA | |
| | CTACCACATGGGAGAGACCACAACCTTTACCTCCAGGTTGGGAAAGAAGAGTTGATGATCGTAGAAGAGT | |
| | TTATTATGTGGATCATAACACCAGAACAACAACGTGGCAGCGGCCTACCATGGAATCTGTCCGAAATTTT | |
| | GAACAGTGGCAATCTCAGCGGAACCAATTGCAGGGAGCTATGCAACAGTTTAACCAACGATACCTCTATT | |
| | CGGCTTCAATGTTAGCTGCAGAAAATGACCCTTATGGACCTTTGCCACCAGGCTGGGAAAAAAGAGTGGA | |
| | TTCAACAGACAGGGTTTACTTTGTGAATCATAACACAAAAACAACCCAGTGGGAAGATCCAAGAACTCAA | |
| | GGCTTACAGAATGAAGAACCCCTGCCAGAAGGCTGGGAAATTAGATATACTCGTGAAGGTGTAAGGTACT | |
| | TTGTTGATCATAACACAAGAACAACAACATTCAAAGATCCTCGCAATGGGAAGTCATCTGTAACTAAAGG | |
| | TGGTCCACAAATTGCTTATGAACGCGGCTTTAGGTGGAAGCTTGCTCACTTCCGTTATTTGTGCCAGTCT | |
| | AATGCACTACCTAGTCATGTAAAGATCAATGTGTCCCGGCAGACATTGTTTGAAGATTCCTTCCAACAGA | |
| | TTATGGCATTAAAACCCTATGACTTGAGGAGGCGCTTATATGTAATATTTAGAGGAGAAGAAGGACTTGA | |
| | TTATGGTGGCCTAGCGAGAGAATGGTTTTTCTTGCTTTCACATGAAGTTTTGAACCCAATGTATTGCTTA | |
| | TTTGAGTATGCGGGCAAGAACAACTATTGTCTGCAGATAAATCCAGCATCAACCATTAATCCAGACCATC | |
| | TTTCATACTTCTGTTTCATTGGTCGTTTTATTGCCATGGCACTATTTCATGGAAAGTTTATCGATACTGG | |
| | TTTCTCTTTACCATTCTACAAGCGTATGTTAAGTAAAAAACTTACTATTAAGGATTTGGAATCTATTGAT | |
| | ACTGAATTTTATAACTCCCTTATCTGGATAAGAGATAACAACATTGAAGAATGTGGCTTAGAAATGTACT | |
| | TTTCTGTTGACATGGAGATTTTGGGAAAAGTTACTTCACATGACCTGAAGTTGGGAGGTTCCAATATTCT | |
| | GGTGACTGAGGAGAACAAAGATGAATATATTGGTTTAATGACAGAATGGCGTTTTTCTCGAGGAGTACAA | |
| | GAACAGACCAAAGCTTTCCTTGATGGTTTTAATGAAGTTGTTCCTCTTCAGTGGCTACAGTACTTCGATG | |
| | AAAAAGAATTAGAGGTTATGTTGTGTGGCATGCAGGAGGTTGACTTGGCAGATTGGCAGAGAAATACTGT | |
| | TTATCGACATTATACAAGAAACAGCAAGCAAATCATTTGGTTTTGGCAGTTTGTGAAAGAGACAGACAAT | |
| | GAAGTAAGAATGCGACTATTGCAGTTCGTCACTGGAACCTGCCGTTTACCTCTAGGAGGATTTGCTGAGC | |
| | TCATGGGAAGTAATGGGCCTCAAAAGTTTTGCATTGAAAAAGTTGGCAAAGACACTTGGTTACCAAGAAG | |
| | CCATACATGTTTTAATCGCTTGGATCTACCACCATATAAGAGTTATGAACAACTAAAGGAAAAACTTCTT | |
| | TTTGCAATAGAAGAGACAGAGGGATTTGGACAAGAATGAATGTGGCTTCTTATTTTGGAGGAGCTCTTGC | |
| | ATTTAAATACCCCAGCCAAGAAAAATTGCACAGATAGTGTATATAAGCTGTTCATTCTGTACAGTGAATT | |
| | TTCCGAACCTCTCAAAGTATGTTTTCCGTTCTTCCACAGAAATATGCAAAACAGTTCATCCTTTTCTACT | |
| | TTATTTATTGTTCCCTTGAAATGACTGACCAGGAAAAAGATCATCCTTAAATTTTGAAGCAAGTGAGAGA | |
| | CTTTATTAAAAATACATATATATCTATATAAACATATATGATAGTGGCTCTAGTTTTATAGAGCTCCAAG | |
| | TGTATTAAACATGACAGCCATTCATTCATAAAGATCTGGATTTGCTTTACCTTGTTAATATTATCTAGGG | |
| | GAAAAAGTGCAAATTGCTCCATGTTCTTCTCTCCCTTATGTAACATCTCCTGAGGGTGTTTAGTTGCATG | |
| | GCTGTTCAGAAAGGTATTAAGGGCTTAGGCCAAATCTTACTTTGAGTATGTTAAAAAAAAAAAAATGCTG | |
| | CTGGCTTTTCTGAAGACAGGTGCTTGAACTTGTCAGTTTGTTTTAAATAAATACAATAGTTGAAAATTTT | |
| | TCTCTGTTACATCAGTAATATTGTTAAAGTAATGGATAGAACCATAACTTACACATGAAAGTCATATACT | |
| | AGATCCAATACTATTTAGTTTATTATCGAAATTGGAAGGATTCATTGAGCAGCATAGAAGTTTGTTTACA | |
| | TGTTACTTTGAGATGCTAGGTATTTGTGGAATTAAAAAGAATCAGGCTCTTTTGTACTTTGTTTTTAAAT | |
| | CTGTGATGCTTTTCAAATTTAATTCATAATAAATTGATGCAATTTCATACTTAGGAACATACAAAAGGTA | |
| | ATGTAAACTCTGCCACTTTTTTGTGTTCAAAATTTTGGTTTTTATGAAGCCAGATGGATTGAAGAGTTAC | |
| | ATAAGCATTTGAATGCTCTAATATAAGGCTAATGATTTTCTGTTAGTGTTTGAATATCTTCATTCCTCTC | |
| | AAATTCATAACAGTTCTATTTAACTGAATTAAATAACCATATGAAAAAAAAAAAAAAAAA | |
| BAG1 | AGGCCGGGGCGGGGCTGGGAAGTAGTCGGGCGGGGTTGTGAGACGCCGCGCTCAGCTTCCATCGCTGGGC | 28 |
| NM_004323.5 | GGTCAACAAGTGCGGGCCTGGCTCAGCGCGGGGGGGCGCGGAGACCGCGAGGCGACCGGGAGCGGCTGGG | |
| | TTCCCGGCTGCGCGCCCTTCGGCCAGGCCGGGAGCCGCGCCAGTCGGAGCCCCCGGCCCAGCGTGGTCCG | |
| | CCTCCCTCTCGGCGTCCACCTGCCCGGAGTACTGCCAGCGGGCATGACCGACCCACCAGGGGCGCCGCCG | |
| | CCGGCGCTCGCAGGCCGCGGATGAAGAAGAAAACCCGGCGCCGCTCGACCCGGAGCGAGGAGTTGACCCG | |
| | GAGCGAGGAGTTGACCCTGAGTGAGGAAGCGACCTGGAGTGAAGAGGCGACCCAGAGTGAGGAGGCGACC | |
| | CAGGGCGAAGAGATGAATCGGAGCCAGGAGGTGACCCGGGACGAGGAGTCGACCCGGAGCGAGGAGGTGA | |
| | CCAGGGAGGAAATGGCGGCAGCTGGGCTCACCGTGACTGTCACCCACAGCAATGAGAAGCACGACCTTCA | |
| | TGTTACCTCCCAGCAGGGCAGCAGTGAACCAGTTGTCCAAGACCTGGCCCAGGTTGTTGAAGAGGTCATA | |
| | GGGGTTCCACAGTCTTTTCAGAAACTCATATTTAAGGGAAAATCTCTGAAGGAAATGGAAACACCGTTGT | |
| | CAGCACTTGGAATACAAGATGGTTGCCGGGTCATGTTAATTGGGAAAAAGAACAGTCCACAGGAAGAGGT | |
| | TGAACTAAAGAAGTTGAAACATTTGGAGAAGTCTGTGGAGAAGATAGCTGACCAGCTGGAAGAGTTGAAT | |
| | AAAGAGCTTACTGGAATCCAGCAGGGTTTTCTGCCCAAGGATTTGCAAGCTGAAGCTCTCTGCAAACTTG | |
| | ATAGGAGAGTAAAAGCCACAATAGAGCAGTTTATGAAGATCTTGGAGGAGATTGACACACTGATCCTGCC | |
| | AGAAAATTTCAAAGACAGTAGATTGAAAAGGAAAGGCTTGGTAAAAAAGGTTCAGGCATTCCTAGCCGAG | |
| | TGTGACACAGTGGAGCAGAACATCTGCCAGGAGACTGAGCGGCTGCAGTCTACAAACTTTGCCCTGGCCG | |
| | AGTGAGGTGTAGCAGAAAAAGGCTGTGCTGCCCTGAAGAATGGCGCCACCAGCTCTGCCGTCTCTGGAGC | |
| | GGAATTTACCTGATTTCTTCAGGGCTGCTGGGGGCAACTGGCCATTTGCCAATTTTCCTACTCTCACACT | |
| | GGTTCTCAATGAAAAATAGTGTCTTTGTGATTTTGAGTAAAGCTCCTATCTGTTTTCTCCTTCTGTCTCT | |
| | GTGGTTGTACTGTCCAGCAATCCACCTTTTCTGGAGAGGGCCACCTCTGCCCAAATTTTCCCAGCTGTTT | |
| | GGACCTCTGGGTGCTTTCTTTGGGCTGGTGAGAGCTCTAATTTGCCTTGGGCCAGTTTCAGGTTTATAGG | |
| | CCCCCTCAGTCTTCAGATACATGAGGGCTTCTTTGCTCTTGTGATCGTGTAGTCCCATAGCTGTAAAACC | |
| | AGAATCACCAGGAGGTTGCACCTAGTCAGGAATATTGGGAATGGCCTAGAACAAGGTGTTTGGCACATAA | |
| | GTAGACCACTTATCCCTCATTGTGACCTAATTCCAGAGCATCTGGCTGGGTTGTTGGGTTCTAGACTTTG | |
| | TCCTCACCTCCCAGTGACCCTGACTAGCCACAGGCCATGAGATACCAGGGGGCCGTTCCTTGGATGGAGC | |
| | CTGTGGTTGATGCAAGGCTTCCTTGTCCCCAAGCAAGTCTTCAGAAGGTTAGAACCCAGTGTTGACTGAG | |
| | TCTGTGCTTGAAACCAGGCCAGAGCCATGGATTAGGAAGGGCAAAGAGAAGGCACCAGAATGAGTAAAGC | |
| | AGGCAGGTGGTGAAGCCAACCATAAACTTCTCAGGAGTGACATGTGCTTCCTTCAAAGGCATTTTTGTTA | |
| | ACCATATCCTTCTGAGTTCTATGTTTCCTTCACAGCTGTTCTATCCATTTTGTGGACTGTCCCCCACCCC | |
| | CACCCCATCATTGTTTTTAAAAAATTAAGGCCTGGCGCAGCAGCTCATGCCTATAATCCCAGCACTTTGG | |
| | GAGGCTGAGGCGGGCGGATCACTTGAGGCCAGGAGTTTGAGACCAGCCCAGGCAACATAGCAAAACCCCA | |
| | TTCTGCTTTAAAAAAAAAAAAAAAAAAAATTAGCTTGGCGTAGTGGCATGTGCCTATAATCCCAGCTACT | |
| | GGGGAGGCTGAGGCACAAGAATCATTTGAACCTGGGAGGTAGAGGTTGCTGTGAGCCGAGATTACGCCCC | |
| | TGCACTCCAGCCTGGGTCACAGAGTGAGACTCCATCTCAGAAAAAAAAAAAATTGAGTCAGGTGCAGTAG | |
| | CTCCTTCCTGTAGTCCCAGCTACTTGGGAGGCTGAGGCTAGAGGATCACTTGAGCCCAGGAGTTTGAGTC | |
| | TAGTCTGGGCAACATAGCAAGACCCCATCTCTAAAATTTAAGTAAGTAAAAGTAGATAAATAAAAAGAAA | |
| | AAAAAACTGTTTATGTGCTCATCATAAAGTAGAAGAGTGGTTTGCTTTTTTTTTTTTTTTTGGATTAATG | |
| | AGGAAATCATTCTGTGGCTCTAGTCATAATTTATGCTTAATAACATTGATAGTAGCCCTTTGCGCTATAA | |
| | CTCTACCTAAAGACTCACATCATTTGGCAGAGAGAGAGTCGTTGAAGTCCCAGGAATTCAGGACTGGGCA | |
| | GGTTAAGACCTCAGACAAGGTAGTAGAGGTAGACTTGTGGACAAGGCTCGGGTCCCAGCCCACCGCACCC | |
| | CAACTTTAATCAGAGTGGTTCACTATTGATCTATTTTTGTGTGATAGCTGTGTGGCGTGGGCCACAACAT | |
| | TTAATGAGAAGTTACTGTGCACCAAACTGCCGAACACCATTCTAAACTATTCATATATATTAGTCATTTA | |
| | ATTCTTACATAACTTGAGAGGTAGACAGATATCCTTATTTTAGAGATGAGGAAACCAAGAGAACTTAGGT | |
| | CATTAGCGCAAGGTTGTAGAGTAAGCGGCAAAGCCAAGACACAAAGCTGGGTGGTTTGGTTTCAGAGCCA | |
| | GTGCTTTTCCCCTCTACTGTACTGCCTCTCAACCAACACAGGGTTGCACAGGCCCATTCTCTGATTTTTT | |
| | TCCTCTTGTCCTCTGCCTCTCCCTCTAGCTCCCACTTCCTCTCTGCTCTAGTTCATTTTCTTTAGAGCAG | |
| | CCCGAGTGATCATGAAGTGCAAATCTTGCCATGTCAGTCCCCTGCTTAGAACCCTCCAATGGCTCACTTT | |
| | CTCTTTAGGCAAAAGTCTTTACCCCATGCCTTCTCCCATCTCATCTCAACCCCCTCATTTGTTGGCTGTC | |
| | TGCTGTCAGCCACTCTTCTTTCAGGTCCTCAGATGCACTGCACCCTCTCCTGCCTGGGGGTCTTTGCTCC | |
| | TGCTACTACCTCTGCTTGAACAGCTCCTCACCTTCCTTCCTCCAACCCTACCCTTGTATAGGTGACTTTT | |
| | GTTCATCCTTCAGAATTCAACTCACATGTCTCTTGCATGGAGAACCCTCACCTACTGTGTTGAGACCCTG | |
| | TCCAGCCCCCAGGTGGGATCCTCTCTCGACTTCCCATACATTTCTTTCACAGCATTTACATAGTCCATGA | |
| | TAGTTTACTTGTGGGATTATTTGGTTAATCTTTGCCTTTAACACCAGGGTTCCTTGGGTGAAGGAGCTTC | |
| | TTTATCTTGGTAACAGCATTATTTCAAGCATAACTTGTAATATAGTTATATTACATATATAACATATATA | |
| | TATATAACATAACATATATAACATATATAACAAGCATAACTTGTTATATAGTCTTGTATATAGTAAGACC | |
| | TCAATAAATATTTGGAGAACAAAAAAAAAAAAAAA | |
| GSTM1 | TGTCCCCTCTCCGGAGCTCTTATACTCTGAGCCCTGCTCGGTTTAGGCCTGTCTGCGGAATCCGCACCAA | 29 |
| NM_000561.3 | CCAGCACCATGCCCATGATACTGGGGTACTGGGACATCCGCGGGCTGGCCCACGCCATCCGCCTGCTCCT | |
| | GGAATACACAGACTCAAGCTATGAGGAAAAGAAGTACACGATGGGGGACGCTCCTGATTATGACAGAAGC | |
| | CAGTGGCTGAATGAAAAATTCAAGCTGGGCCTGGACTTTCCCAATCTGCCCTACTTGATTGATGGGGCTC | |
| | ACAAGATCACCCAGAGCAACGCCATCTTGTGCTACATTGCCCGCAAGCACAACCTGTGTGGGGAGACAGA | |
| | AGAGGAGAAGATTCGTGTGGACATTTTGGAGAACCAGACCATGGACAACCATATGCAGCTGGGCATGATC | |
| | TGCTACAATCCAGAATTTGAGAAACTGAAGCCAAAGTACTTGGAGGAACTCCCTGAAAAGCTAAAGCTCT | |
| | ACTCAGAGTTTCTGGGGAAGCGGCCATGGTTTGCAGGAAACAAGATCACTTTTGTAGATTTTCTCGTCTA | |
| | TGATGTCCTTGACCTCCACCGTATATTTGAGCCCAAGTGCTTGGACGCCTTCCCAAATCTGAAGGACTTC | |
| | ATCTCCCGCTTTGAGGGCTTGGAGAAGATCTCTGCCTACATGAAGTCCAGCCGCTTCCTCCCAAGACCTG | |
| | TGTTCTCAAAGATGGCTGTCTGGGGCAACAAGTAGGGCCTTGAAGGCCAGGAGGTGGGAGTGAGGAGCCC | |
| | ATACTCAGCCTGCTGCCCAGGCTGTGCAGCGCAGCTGGACTCTGCATCCCAGCACCTGCCTCCTCGTTCC | |
| | TTTCTCCTGTTTATTCCCATCTTTACTCCCAAGACTTCATTGTCCCTCTTCACTCCCCCTAAACCCCTGT | |
| | CCCATGCAGGCCCTTTGAAGCCTCAGCTACCCACTATCCTTCGTGAACATCCCCTCCCATCATTACCCTT | |
| | CCCTGCACTAAAGCCAGCCTGACCTTCCTTCCTGTTAGTGGTTGTGTCTGCTTTAAAGGGCCTGCCTGGC | |
| | CCCTCGCCTGTGGAGCTCAGCCCCGAGCTGTCCCCGTGTTGCATGAAGGAGCAGCATTGACTGGTTTACA | |
| | GGCCCTGCTCCTGCAGCATGGTCCCTGCCTTAGGCCTACCTGATGGAAGTAAAGCCTCAACCACAAAAAA | |
| | AAAAAAAAAAAAAAAAAAAAAAAAAAAAAAAAAAAAAAAAAAAAAAAAAAAAAAAAAAAAAAAAAAAAAA | |
| | AAAAAA | |
| MMP11 | AAGCCCAGCAGCCCCGGGGCGGATGGCTCCGGCCGCCTGGCTCCGCAGCGCGGCCGCGCGCGCCCTCCTG | 30 |
| NM_005940.3 | CCCCCGATGCTGCTGCTGCTGCTCCAGCCGCCGCCGCTGCTGGCCCGGGCTCTGCCGCCGGACGCCCACC | |
| | ACCTCCATGCCGAGAGGAGGGGGCCACAGCCCTGGCATGCAGCCCTGCCCAGTAGCCCGGCACCTGCCCC | |
| | TGCCACGCAGGAAGCCCCCCGGCCTGCCAGCAGCCTCAGGCCTCCCCGCTGTGGCGTGCCCGACCCATCT | |
| | GATGGGCTGAGTGCCCGCAACCGACAGAAGAGGTTCGTGCTTTCTGGCGGGCGCTGGGAGAAGACGGACC | |
| | TCACCTACAGGATCCTTCGGTTCCCATGGCAGTTGGTGCAGGAGCAGGTGCGGCAGACGATGGCAGAGGC | |
| | CCTAAAGGTATGGAGCGATGTGACGCCACTCACCTTTACTGAGGTGCACGAGGGCCGTGCTGACATCATG | |
| | ATCGACTTCGCCAGGTACTGGCATGGGGACGACCTGCCGTTTGATGGGCCTGGGGGCATCCTGGCCCATG | |
| | CCTTCTTCCCCAAGACTCACCGAGAAGGGGATGTCCACTTCGACTATGATGAGACCTGGACTATCGGGGA | |
| | TGACCAGGGCACAGACCTGCTGCAGGTGGCAGCCCATGAATTTGGCCACGTGCTGGGGCTGCAGCACACA | |
| | ACAGCAGCCAAGGCCCTGATGTCCGCCTTCTACACCTTTCGCTACCCACTGAGTCTCAGCCCAGATGACT | |
| | GCAGGGGCGTTCAACACCTATATGGCCAGCCCTGGCCCACTGTCACCTCCAGGACCCCAGCCCTGGGCCC | |
| | CCAGGCTGGGATAGACACCAATGAGATTGCACCGCTGGAGCCAGACGCCCCGCCAGATGCCTGTGAGGCC | |
| | TCCTTTGACGCGGTCTCCACCATCCGAGGCGAGCTCTTTTTCTTCAAAGCGGGCTTTGTGTGGCGCCTCC | |
| | GTGGGGGCCAGCTGCAGCCCGGCTACCCAGCATTGGCCTCTCGCCACTGGCAGGGACTGCCCAGCCCTGT | |
| | GGACGCTGCCTTCGAGGATGCCCAGGGCCACATTTGGTTCTTCCAAGGTGCTCAGTACTGGGTGTACGAC | |
| | GGTGAAAAGCCAGTCCTGGGCCCCGCACCCCTCACCGAGCTGGGCCTGGTGAGGTTCCCGGTCCATGCTG | |
| | CCTTGGTCTGGGGTCCCGAGAAGAACAAGATCTACTTCTTCCGAGGCAGGGACTACTGGCGTTTCCACCC | |
| | CAGCACCCGGCGTGTAGACAGTCCCGTGCCCCGCAGGGCCACTGACTGGAGAGGGGTGCCCTCTGAGATC | |
| | GACGCTGCCTTCCAGGATGCTGATGGCTATGCCTACTTCCTGCGCGGCCGCCTCTACTGGAAGTTTGACC | |
| | CTGTGAAGGTGAAGGCTCTGGAAGGCTTCCCCCGTCTCGTGGGTCCTGACTTCTTTGGCTGTGCCGAGCC | |
| | TGCCAACACTTTCCTCTGACCATGGCTTGGATGCCCTCAGGGGTGCTGACCCCTGCCAGGCCACGAATAT | |
| | CAGGCTAGAGACCCATGGCCATCTTTGTGGCTGTGGGCACCAGGCATGGGACTGAGCCCATGTCTCCTCA | |
| | GGGGGATGGGGTGGGGTACAACCACCATGACAACTGCCGGGAGGGCCACGCAGGTCGTGGTCACCTGCCA | |
| | GCGACTGTCTCAGACTGGGCAGGGAGGCTTTGGCATGACTTAAGAGGAAGGGCAGTCTTGGGCCCGCTAT | |
| | GCAGGTCCTGGCAAACCTGGCTGCCCTGTCTCCATCCCTGTCCCTCAGGGTAGCACCATGGCAGGACTGG | |
| | GGGAACTGGAGTGTCCTTGCTGTATCCCTGTTGTGAGGTTCCTTCCAGGGGCTGGCACTGAAGCAAGGGT | |
| | GCTGGGGCCCCATGGCCTTCAGCCCTGGCTGAGCAACTGGGCTGTAGGGCAGGGCCACTTCCTGAGGTCA | |
| | GGTCTTGGTAGGTGCCTGCATCTGTCTGCCTTCTGGCTGACAATCCTGGAAATCTGTTCTCCAGAATCCA | |
| | GGCCAAAAAGTTCACAGTCAAATGGGGAGGGGTATTCTTCATGCAGGAGACCCCAGGCCCTGGAGGCTGC | |
| | AACATACCTCAATCCTGTCCCAGGCCGGATCCTCCTGAAGCCCTTTTCGCAGCACTGCTATCCTCCAAAG | |
| | CCATTGTAAATGTGTGTACAGTGTGTATAAACCTTCTTCTTCTTTTTTTTTTTTTAAACTGAGGATTGTC | |
| | ATTAAACACAGTTGTTTTCTAAAAAAAAAAAAAAAA | |
| CD68 | TTAATTACAAAAACTAATGACTAAGAGAGAGGTGGCTAGAGCTGAGGCCCCTGAGTCAGGCTGTGGGTGG | 31 |
| NM_001251.2 | GATCATCTCCAGTACAGGAAGTGAGACTTTCATTTCCTCCTTTCCAAGAGAGGGCTGAGGGAGCAGGGTT | |
| | GAGCAACTGGTGCAGACAGCCTAGCTGGACTTTGGGTGAGGCGGTTCAGCCATGAGGCTGGCTGTGCTTT | |
| | TCTCGGGGGCCCTGCTGGGGCTACTGGCAGCCCAGGGGACAGGGAATGACTGTCCTCACAAAAAATCAGC | |
| | TACTTTGCTGCCATCCTTCACGGTGACACCCACGGTTACAGAGAGCACTGGAACAACCAGCCACAGGACT | |
| | ACCAAGAGCCACAAAACCACCACTCACAGGACAACCACCACAGGCACCACCAGCCACGGACCCACGACTG | |
| | CCACTCACAACCCCACCACCACCAGCCATGGAAACGTCACAGTTCATCCAACAAGCAATAGCACTGCCAC | |
| | CAGCCAGGGACCCTCAACTGCCACTCACAGTCCTGCCACCACTAGTCATGGAAATGCCACGGTTCATCCA | |
| | ACAAGCAACAGCACTGCCACCAGCCCAGGATTCACCAGTTCTGCCCACCCAGAACCACCTCCACCCTCTC | |
| | CGAGTCCTAGCCCAACCTCCAAGGAGACCATTGGAGACTACACGTGGACCAATGGTTCCCAGCCCTGTGT | |
| | CCACCTCCAAGCCCAGATTCAGATTCGAGTCATGTACACAACCCAGGGTGGAGGAGAGGCCTGGGGCATC | |
| | TCTGTACTGAACCCCAACAAAACCAAGGTCCAGGGAAGCTGTGAGGGTGCCCATCCCCACCTGCTTCTCT | |
| | CATTCCCCTATGGACACCTCAGCTTTGGATTCATGCAGGACCTCCAGCAGAAGGTTGTCTACCTGAGCTA | |
| | CATGGCGGTGGAGTACAATGTGTCCTTCCCCCACGCAGCACAGTGGACATTCTCGGCTCAGAATGCATCC | |
| | CTTCGAGATCTCCAAGCACCCCTGGGGCAGAGCTTCAGTTGCAGCAACTCGAGCATCATTCTTTCACCAG | |
| | CTGTCCACCTCGACCTGCTCTCCCTGAGGCTCCAGGCTGCTCAGCTGCCCCACACAGGGGTCTTTGGGCA | |
| | AAGTTTCTCCTGCCCCAGTGACCGGTCCATCTTGCTGCCTCTCATCATCGGCCTGATCCTTCTTGGCCTC | |
| | CTCGCCCTGGTGCTTATTGCTTTCTGCATCATCCGGAGACGCCCATCCGCCTACCAGGCCCTCTGAGCAT | |
| | TTGCTTCAAACCCCAGGGCACTGAGGGGGTTGGGGTGTGGTGGGGGGGTACCCTTATTTCCTCGACACGC | |
| | AACTGGCTCAAAGACAATGTTATTTTCCTTCCCTTTCTTGAAGAACAAAAAGAAAGCCGGGCATGACGGC | |
| | TCATGCCTGTAATCCCAGCACTTTGGGAGGCTGAGGCAGGTGGATCACTGGAGGTCAGGAGTTTGAGACC | |
| | AGCCTGGCCAACATGGTGAAACCCTGTCTCTACTAAAAATACAATTAGCCAGGTGTGGCGGCGTAATCCC | |
| | AGCTGGCCTGTAATCCCAGCTACTTGGGAGGCTGAGGCAGAACTGCTTGAACCCAGGAGGTGGAGGTTGC | |
| | AGTGAGCCGTCATCGCGCCACTAAGCCAAGATCGCGCCACTGCACTCCAGCCTGGGCGACAGAGCCAGAC | |
| | TGTCTCAAATAAATAAATATGAGATAATGCAGTCGGGAGAAGGGAGGGAGAGAATTTTATTAAATGTGAC | |
| | GAACTGCCCCCCCCCCCCCCCCAGCAGGAGAGCAGCAAAATTTATGCAAATCTTTGACGGGGTTTTCCTT | |
| | GTCCTGCCAGGATTAAAAGCCATGAGTTTCTTGTCAAAAAAAAAAAAAAAAA | |
| C17orf37 | GGCCGCGATGAGCGGGGAGCCGGGGCAGACGTCCGTAGCGCCCCCTCCCGAGGAGGTCGAGCCGGGCAGT | 32 |
| BC006006.1 | GGGGTCCGCATCGTGGTGGAGTACTGTGAACCCTGCGGCTTCGAGGCGACCTACCTGGAGCTGGCCAGTG | |
| | CTGTGAAGGAGCAGTATCCGGGCATCGAGATCGAGTCGCGCCTCGGGGGCACAGGTGCCTTTGAGATAGA | |
| | GATAAATGGACAGCTGGTGTTCTCCAAGCTGGAGAATGGGGGCTTTCCCTATGAGAAAGATCTCATTGAG | |
| | GCCATCCGAAGAGCCAGTAATGGAGAAACCCTAGAAAAGATCACCAACAGCCGTCCTCCCTGCGTCATCC | |
| | TGTGACTGCACAGGACTCTGGGTTCCTGCTCTGTTCTGGGGTCCAAACCTTGGTCTCCCTTTGGTCCTGC | |
| | TGGGAGCTCCCCCTGCCTCTTTCCCCTACTTAGCTCCTTAGCAAAGAGACCCTGGCCTCCACTTTGCCCT | |
| | TTGGGTACAAAGAAGGAATAGAAGATTCCGTGGCCTTGGGGGCAGGAGAGAGACACTCTCCATGAACACT | |
| | TCTCCAGCCACCTCATACCCCCTTCCCAGGGTAAGTGCCCACGAAAGCCCAGTCCACTCTTCGCCTCGGT | |
| | AATACCTGTCTGATGCCACAGATTTTATTTATTCTCCCCTAACCCAGGGCAATGTCAGCTATTGGCAGTA | |
| | AAGTGGCGCTACAAACACTAAAAAAAAAAAAAAAAAAAAAAAAAAAAA | |
| TCAP | AATGAGGAGTGATCATGGCTACCTCAGAGCTGAGCTGCGAGGTGTCGGAGGAGAACTGTGAGCGCCGGGA | 33 |
| NM_003673.3 | GGCCTTCTGGGCAGAATGGAAGGATCTGACACTGTCCACACGGCCCGAGGAGGGCTGCTCCCTGCATGAG | |
| | GAGGACACCCAGAGACATGAGACCTACCACCAGCAGGGGCAGTGCCAGGTGCTGGTGCAGCGCTCGCCCT | |
| | GGCTGATGATGCGGATGGGCATCCTCGGCCGTGGGCTGCAGGAGTACCAGCTGCCCTACCAGCGGGTACT | |
| | GCCGCTGCCCATCTTCACCCCTGCCAAGATGGGCGCCACCAAGGAGGAGCGTGAGGACACCCCCATCCAG | |
| | CTTCAGGAGCTGCTGGCGCTGGAGACAGCCCTGGGTGGCCAGTGTGTGGACCGCCAGGAGGTGGCTGAGA | |
| | TCACAAAGCAGCTGCCCCCTGTGGTGCCTGTCAGCAAGCCCGGTGCACTTCGTCGCTCCCTGTCCCGCTC | |
| | CATGTCCCAGGAAGCACAGAGAGGCTGAGAGGGACTGTGACTTGGGCTCCGCTGTGCCCGCCCTGGGCTG | |
| | GGCCCTTCCTGGCTAGGACTGTGGAGGGGAGCTGCTGGCCATGGCTGCTTTGTAGTTTGCCCAGAGTTGG | |
| | GGGCTAGGGGAGGGGGGAGCCAGAGGCCAGGATGCCTGAGCCCCCTGAGTTCCCAAAGGGAGGGTGGCAG | |
| | AGACAGTGGGCACTAAGGGTGGAGAGTTGGGGGCCAGCACAGCTGAGGACCCTCAGCCCCAGGAGAAGGG | |
| | ACAAAAGGTACTGGTGAGGGCAAGAGGTGCCTGGGAGGAGTGGCCCTGATCCAGGAAAATGTGAGGGGAA | |
| | TCTGGAACGCTCTAGGCAGAAGAAGCTGGGAGGGAGGGGGAGGTGAAAAGGGCAGAGGCAAGGATGGTGG | |
| | GGCCCCCAGCACCCTCTGTTAGTGCCGCAATAAATGCTCAATCATGTGCCAGA | |
| EMSY | ATGCCTGTTGTGTGGCCAACCCTTCTGGATCTCAGCAGGGATGAATGCAAAAGAATTCTTCGAAAATTGG | 34 |
| AJ430203.1 | AATTGGAGGCATATGCTGGAGTTATCAGTGCACTTCGGGCACAGGGGGATCTCACCAAGGAAAAGAAAGA | |
| | TCTTCTTGGAGAACTATCAAAAGTTCTTAGCATCTCAACAGAACGCCACCGTGCTGAAGTTCGGAGAGCA | |
| | GTAAACGATGAACGGTTAACAACAATTGCACATAATATGTCTGGACCTAATAGCTCTTCAGAATGGTCCA | |
| | TTGAAGGTCGTCGATTGGTACCACTGATGCCCCGGCTCGTTCCCCAAACCGCCTTTACTGTAACAGCTAA | |
| | TGCTGTTGCTAATGCAGCTATCCAGCATAATGCATCTCTTCCAGTGCCTGCAGAAACAGGAAGCAAGGAA | |
| | GTGGTTTGCTATTCCTACACAAGTACCACGTCAACCCCAACCTCTACCCCTGTTCCAAGTGGCAGCATAG | |
| | CAACGGTTAAGTCTCCAAGACCTGCCAGTCCTGCCTCCAATGTAGTTGTCTTGCCAAGTGGAAGTACTGT | |
| | TTATGTCAAAAGTGTAAGCTGTTCAGATGAAGATGAAAAACCCAGAAAACGAAGGCGAACAAACTCTTCC | |
| | AGCTCCTCTCCTGTTGTTCTAAAGGAAGTTCCAAAGGCCGTTGTTCCAGTCTCAAAGACGATCACTGTGC | |
| | CTGTGAGTGGTAGTCCCAAGATGAGCAACATCATGCAGAGCATTGCCAACTCCTTACCACCCCACATGTC | |
| | TCCTGTAAAAATAACCTTCACTAAACCATCAACACAGACAACAAACACAACAACACAGAAGGTTATTATA | |
| | GTCACCACATCACCAAGCTCAACCTTCGTGCCCAACATTCTCTCCAAATCCCATAACTATGCAGCAGTCA | |
| | CTAAGCTTGTACCAACGTCAGTCATTGCTTCTACAACCCAGAAGCCACCAGTTGTTATAACTGCTTCACA | |
| | GTCCTCTCTGGTCAGTAATAGCAGCAGTGGCAGCAGCAGTTCTACACCATCACCTATTCCTAATACAGTT | |
| | GCAGTAACAGCTGTGGTGTCCTCTACACCATCTGTGGTCATGTCAACAGTAGCACAAGGTGTATCTACAT | |
| | CAGCAATCAAAATGGCATCAACCAGACTTCCTTCCCCCAAAAGCTTAGTGAGTGCCCCAACTCAGATTCT | |
| | TGCACAGTTCCCTAAACAACATCAACAGTCTCCTAAGCAGCAGTTATATCAAGTGCAACAGCAGACACAG | |
| | CAACAAGTGGCCCAGCCTTCTCCAGTATCTCATCAGCAACAGCCTCAGCAGTCTCCTTTGCCACCTGGTA | |
| | TTAAACCTACCATCCAAATCAAACAGGAGTCAGGTGTTAAAATCATCACACAACAGGTTCAACCAAGTAA | |
| | AATCTTACCCAAACCAGTGACAGCAACTCTACCCACCAGTAGCAATTCCCCTATTATGGTGGTTAGCAGT | |
| | AATGGTGCAATTATGACAACTAAACTGGTAACCACTCCTACTGGCACACAAGCAACCTATACCCGGCCAA | |
| | CAGTGAGCCCATCCATTGGTCGGATGGCTGCAACCCCTGGAGCTGCAACCTATGTGAAAACTACGAGTGG | |
| | TAGCATCATTACAGTAGTACCCAAATCATTAGCTACCTTGGGGGGCAAGATAATTAGCAGTAATATAGTT | |
| | TCTGGAACGACTACCAAAATCACTACAATCCCAATGACTTCCAAGCCCAACGTGATTGTTGTACAAAAGA | |
| | CTACAGGAAAAGGAACGACCATTCAAGGCCTCCCGGGCAAAAATGTTGTCACAACGTTGCTAAATGCTGG | |
| | AGGAGAAAAGACTATTCAGACAGTGCCAACAGGAGCAAAGCCAGCTATCCTTACTGCTACAAGACCCATC | |
| | ACCAAAATGATTGTAACGCAGCCAAAAGGAATAGGTTCTACAGTTCAACCAGCAGCTAAAATCATCCCAA | |
| | CAAAAATTGTTTATGGGCAGCAAGGGAAAACGCAGGTTCTTATTAAACCCAAACCAGTGACTTTTCAAGC | |
| | GACAGTTGTTAGTGAACAAACAAGACAGCTAGTAACAGAAACATTACAGCAAGCATCCAGGGTAGCAGAG | |
| | GCTGGTAATTCATCTATTCAGGAAGGAAAAGAAGAACCACAGAATTATACAGATAGTAGTTCCTCTTCTA | |
| | CAGAGTCCTCCCAGAGTTCCCAAGATTCCCAGCCTGTAGTTCATGTAATTGCTTCCCGGCGTCAGGATTG | |
| | GTCAGAACATGAGATTGCAATGGAGACTAGCCCTACCATAATTTATCAGGATGTATCCAGTGAATCACAA | |
| | TCCGCTACTTCAACAATCAAAGCTCTGTTAGAACTCCAACAGACAACAGTAAAGGAAAAATTGGAATCTA | |
| | AACCAAGACAACCCACTATTGACCTGAGTCAAATGGCAGTGCCTATTCAGATGACCCAGGAAAAGAGACA | |
| | TTCTCCTGAGAGTCCATCAATTGCTGTGGTAGAGTCAGAACTAGTAGCTGAATACATCACTACTGAACGC | |
| | ACTGATGAGGGGACAGAGGTTGCTTTTCCCCTTCTAGTCAGCCATCGCTCCCAGCCCCAACAGCCTTCCC | |
| | AGCCCCAGCGGACCCTGCTCCAGCATGTGGCTCAGTCACAGACCGCAACACAGACTTCGGTGGTGGTGAA | |
| | GTCCATCCCAGCATCTTCCCCTGGAGCAATCACCCACATTATGCAGCAGGCATTAAGCAGTCACACTGCT | |
| | TTTACCAAACACAGCGAGGAACTTGGAACTGAGGAGGGCGAGGTTGAAGAGATGGACACTTTAGACCCTC | |
| | AGACAGGTCTGTTTTACCGATCTGCCCTGACTCAGTCACAGTCAGCTAAACAGCAGAAACTTAGCCAGCC | |
| | CCCGCTGGAACAGACTCAGCTGCAAGTGAAAACTCTGCAGTGCTTCCAGACTAAACAGAAGCAGACCATC | |
| | CACCTGCAGGCAGACCAGCTCCAGCACAAACTCCCGCAAATGCCCCAGCTTTCCATCAGGCATCAAAAAC | |
| | TCACCCCTCTCCAGCAAGAACAAGCACAGCCCAAGCCAGATGTACAGCACACACAGCATCCCATGGTGGC | |
| | CAAAGACAGGCAGCTTCCTACCTTAATGGCACAGCCCCCGCAAACTGTAGTACAGGTGCTTGCAGTGAAA | |
| | ACCACGCAGCAGCTCCCTAAACTGCAGCAGGCTCCGAACCAACCAAAAATCTACGTGCAACCCCAAACCC | |
| | CCCAGAGCCAAATGTCGCTCCCAGCTTCTTCAGAGAAACAGACGGCAAGCCAGGTGGAGCAGCCAATTAT | |
| | AACCCAAGGATCCTCTGTTACAAAGATAACTTTTGAGGGGCGCCAGCCTCCCACAGTTACAAAGATAACT | |
| | GGTGGCAGTTCTGTGCCTAAGCTGACATCACCAGTTACAAGCATATCTCCCATTCAGGCCTCTGAGAAGA | |
| | CAGCAGTGTCTGACATTTTGAAAATGTCTTTGATGGAAGCTCAGATTGATACAAATGTAGAACATATGAT | |
| | AGTGGATCCCCCAAAGAAGGCTCTTGCCACTAGCATGCTCACTGGTGAAGCAGGATCATTACCCTCCACC | |
| | CACATGGTGGTGGCAGGGATGGCGAATTCCACTCCCCAGCAACAGAAATGTAGAGAGTCCTGTTCGAGTC | |
| | CATCCACTGTTGGCTCTTCCCTAACGACAAGGAAAATTGATCCACCAGCAGTGCCTGCGACAGGCCAGTT | |
| | CATGCGTATTCAGAATGTAGGCCAAAAGAAAGCTGAAGAGAGTCCAGCAGAAATTATCATCCAGGCTATT | |
| | CCTCAGTATGCTATTCCTTGTCACTCCAGCTCCAATGTGGTGGTGGAGCCCAGTGGGCTTCTTGAGCTAA | |
| | ACAACTTCACTAGTCAACAGCTGGATGATGAGGAGACAGCAATGGAGCAGGACATAGACAGTAGCACGGA | |
| | GGATGGAACTGAACCCAGCCCTTCTCAGAGCTCTGCTGAACGGTCCTAGTGTTTGGACACAATAGTGCAC | |
| | TTTAAAACCTGCTTGGTTACCAAGTGTCCAGGGAAACCCTTGTATTTTGATGACTAAAAAGAGC | |
| IGFBP2 | TGCGGCGGCGAGGGAGGAGGAAGAAGCGGAGGAGGCGGCTCCCGCGCTCGCAGGGCCGTGCCACCTGCCC | 35 |
| NM_000597.2 | GCCCGCCCGCTCGCTCGCTCGCCCGCCGCGCCGCGCTGCCGACCGCCAGCATGCTGCCGAGAGTGGGCTG | |
| | CCCCGCGCTGCCGCTGCCGCCGCCGCCGCTGCTGCCGCTGCTGCCGCTGCTGCTGCTGCTACTGGGCGCG | |
| | AGTGGCGGCGGCGGCGGGGCGCGCGCGGAGGTGCTGTTCCGCTGCCCGCCCTGCACACCCGAGCGCCTGG | |
| | CCGCCTGCGGGCCCCCGCCGGTTGCGCCGCCCGCCGCGGTGGCCGCAGTGGCCGGAGGCGCCCGCATGCC | |
| | ATGCGCGGAGCTCGTCCGGGAGCCGGGCTGCGGCTGCTGCTCGGTGTGCGCCCGGCTGGAGGGCGAGGCG | |
| | TGCGGCGTCTACACCCCGCGCTGCGGCCAGGGGCTGCGCTGCTATCCCCACCCGGGCTCCGAGCTGCCCC | |
| | TGCAGGCGCTGGTCATGGGCGAGGGCACTTGTGAGAAGCGCCGGGACGCCGAGTATGGCGCCAGCCCGGA | |
| | GCAGGTTGCAGACAATGGCGATGACCACTCAGAAGGAGGCCTGGTGGAGAACCACGTGGACAGCACCATG | |
| | AACATGTTGGGCGGGGGAGGCAGTGCTGGCCGGAAGCCCCTCAAGTCGGGTATGAAGGAGCTGGCCGTGT | |
| | TCCGGGAGAAGGTCACTGAGCAGCACCGGCAGATGGGCAAGGGTGGCAAGCATCACCTTGGCCTGGAGGA | |
| | GCCCAAGAAGCTGCGACCACCCCCTGCCAGGACTCCCTGCCAACAGGAACTGGACCAGGTCCTGGAGCGG | |
| | ATCTCCACCATGCGCCTTCCGGATGAGCGGGGCCCTCTGGAGCACCTCTACTCCCTGCACATCCCCAACT | |
| | GTGACAAGCATGGCCTGTACAACCTCAAACAGTGCAAGATGTCTCTGAACGGGCAGCGTGGGGAGTGCTG | |
| | GTGTGTGAACCCCAACACCGGGAAGCTGATCCAGGGAGCCCCCACCATCCGGGGGGACCCCGAGTGTCAT | |
| | CTCTTCTACAATGAGCAGCAGGAGGCTCGCGGGGTGCACACCCAGCGGATGCAGTAGACCGCAGCCAGCC | |
| | GGTGCCTGGCGCCCCTGCCCCCCGCCCCTCTCCAAACACCGGCAGAAAACGGAGAGTGCTTGGGTGGTGG | |
| | GTGCTGGAGGATTTTCCAGTTCTGACACACGTATTTATATTTGGAAAGAGACCAGCACCGAGCTCGGCAC | |
| | CTCCCCGGCCTCTCTCTTCCCAGCTGCAGATGCCACACCTGCTCCTTCTTGCTTTCCCCGGGGGAGGAAG | |
| | GGGGTTGTGGTCGGGGAGCTGGGGTACAGGTTTGGGGAGGGGGAAGAGAAATTTTTATTTTTGAACCCCT | |
| | GTGTCCCTTTTGCATAAGATTAAAGGAAGGAAAAGTAAA | |
| MDM2 | GCACCGCGGCGAGCTTGGCTGCTTCTGGGGCCTGTGTGGCCCTGTGTGTCGGAAAGATGGAGCAAGAAGC | 36 |
| NM_002392.4 | CGAGCCCGAGGGGCGGCCGCGACCCCTCTGACCGAGATCCTGCTGCTTTCGCAGCCAGGAGCACCGTCCC | |
| | TCCCCGGATTAGTGCGTACGAGCGCCCAGTGCCCTGGCCCGGAGAGTGGAATGATCCCCGAGGCCCAGGG | |
| | CGTCGTGCTTCCGCGCGCCCCGTGAAGGAAACTGGGGAGTCTTGAGGGACCCCCGACTCCAAGCGCGAAA | |
| | ACCCCGGATGGTGAGGAGCAGGCAAATGTGCAATACCAACATGTCTGTACCTACTGATGGTGCTGTAACC | |
| | ACCTCACAGATTCCAGCTTCGGAACAAGAGACCCTGGTTAGACCAAAGCCATTGCTTTTGAAGTTATTAA | |
| | AGTCTGTTGGTGCACAAAAAGACACTTATACTATGAAAGAGGTTCTTTTTTATCTTGGCCAGTATATTAT | |
| | GACTAAACGATTATATGATGAGAAGCAACAACATATTGTATATTGTTCAAATGATCTTCTAGGAGATTTG | |
| | TTTGGCGTGCCAAGCTTCTCTGTGAAAGAGCACAGGAAAATATATACCATGATCTACAGGAACTTGGTAG | |
| | TAGTCAATCAGCAGGAATCATCGGACTCAGGTACATCTGTGAGTGAGAACAGGTGTCACCTTGAAGGTGG | |
| | GAGTGATCAAAAGGACCTTGTACAAGAGCTTCAGGAAGAGAAACCTTCATCTTCACATTTGGTTTCTAGA | |
| | CCATCTACCTCATCTAGAAGGAGAGCAATTAGTGAGACAGAAGAAAATTCAGATGAATTATCTGGTGAAC | |
| | GACAAAGAAAACGCCACAAATCTGATAGTATTTCCCTTTCCTTTGATGAAAGCCTGGCTCTGTGTGTAAT | |
| | AAGGGAGATATGTTGTGAAAGAAGCAGTAGCAGTGAATCTACAGGGACGCCATCGAATCCGGATCTTGAT | |
| | GCTGGTGTAAGTGAACATTCAGGTGATTGGTTGGATCAGGATTCAGTTTCAGATCAGTTTAGTGTAGAAT | |
| | TTGAAGTTGAATCTCTCGACTCAGAAGATTATAGCCTTAGTGAAGAAGGACAAGAACTCTCAGATGAAGA | |
| | TGATGAGGTATATCAAGTTACTGTGTATCAGGCAGGGGAGAGTGATACAGATTCATTTGAAGAAGATCCT | |
| | GAAATTTCCTTAGCTGACTATTGGAAATGCACTTCATGCAATGAAATGAATCCCCCCCTTCCATCACATT | |
| | GCAACAGATGTTGGGCCCTTCGTGAGAATTGGCTTCCTGAAGATAAAGGGAAAGATAAAGGGGAAATCTC | |
| | TGAGAAAGCCAAACTGGAAAACTCAACACAAGCTGAAGAGGGCTTTGATGTTCCTGATTGTAAAAAAACT | |
| | ATAGTGAATGATTCCAGAGAGTCATGTGTTGAGGAAAATGATGATAAAATTACACAAGCTTCACAATCAC | |
| | AAGAAAGTGAAGACTATTCTCAGCCATCAACTTCTAGTAGCATTATTTATAGCAGCCAAGAAGATGTGAA | |
| | AGAGTTTGAAAGGGAAGAAACCCAAGACAAAGAAGAGAGTGTGGAATCTAGTTTGCCCCTTAATGCCATT | |
| | GAACCTTGTGTGATTTGTCAAGGTCGACCTAAAAATGGTTGCATTGTCCATGGCAAAACAGGACATCTTA | |
| | TGGCCTGCTTTACATGTGCAAAGAAGCTAAAGAAAAGGAATAAGCCCTGCCCAGTATGTAGACAACCAAT | |
| | TCAAATGATTGTGCTAACTTATTTCCCCTAGTTGACCTGTCTATAAGAGAATTATATATTTCTAACTATA | |
| | TAACCCTAGGAATTTAGACAACCTGAAATTTATTCACATATATCAAAGTGAGAAAATGCCTCAATTCACA | |
| | TAGATTTCTTCTCTTTAGTATAATTGACCTACTTTGGTAGTGGAATAGTGAATACTTACTATAATTTGAC | |
| | TTGAATATGTAGCTCATCCTTTACACCAACTCCTAATTTTAAATAATTTCTACTCTGTCTTAAATGAGAA | |
| | GTACTTGGTTTTTTTTTTTCTTAAATATGTATATGACATTTAAATGTAACTTATTATTTTTTTTGAGACC | |
| | GAGTCTTGCTCTGTTACCCAGGCTGGAGTGCAGTGGCGTGATCTTGGCTCACTGCAAGCTCTGCCTCCCG | |
| | GGTTCGCACCATTCTCCTGCCTCAGCCTCCCAATTAGCTTGGCCTACAGTCATCTGCCACCACACCTGGC | |
| | TAATTTTTTGTACTTTTAGTAGAGACAGGGTTTCACCGTGTTAGCCAGGATGGTCTCGATCTCCTGACCT | |
| | CGTGATCCGCCCACCTCGGCCTCCCAAAGTGCTGGGATTACAGGCATGAGCCACCGCGTCCGGCCTAAAT | |
| | GTCACTTAGTACCTTTGATATAAAGAGAAAATGTGTGAAAGATTTAGTTTTTTGTTTTTTTGTTTGTTTG | |
| | TTTGTTTGTTTGTTTTGAGATGAGTCTCTCTGTCGCCCAGGCTGGAGTGCAGTGTCATGATCTAGCAGTC | |
| | TCCGCTTCCCGGGTTCAAGCCATTCTCCTGGCTCAGCCTCTGGAGCAGCTGGGATTACAGGCATGCACCA | |
| | CCATGCCCAGCTAATTTTTGTATTTTTAGTAGAGATAGGGTTTCACCATGTTGGCCAGGCTGGTCACGAA | |
| | CTCCTGACCTCAAGTGAGGTCACCCGCCTCGGCCTCCCGAAGTGCTGGGATTGCAGATGTGAGCCACCAT | |
| | GTCCAGCCAAGAATTAGTATTTAAATTTTAGATACTCTTTTTTTTTTTTTTTTTTTTTTTTTTTGAGACA | |
| | GAGTCTTGCTCCATCACCCATGCTAGAGTGCAGTGGAGTGATCTCGGCTCACTGCAACTTCCGCCTTCTG | |
| | GGTTCAAGCTATTCTCCTGCCTCAGCCTTCCAAGTAACTGGGATTACAGGCATGTACCACCATACCAGCT | |
| | GATTTTTTTGTATTTTTAGTAAAGACAGGGTTTCACCATGTTAGCCAGGCTGATCTTGAACTCCTAAACT | |
| | CAAGTGATCTACTCACCTCAGCCTCCCAAAATGCTGGGATTACAGATGTGAGGCACCTGGCCTCAGATTT | |
| | TTGATACTCTTAAACCTTCTGATCCTTAGTTTCTCTCTCCAAAATACTCTTTCTAGGTTAAAAAAAAAAA | |
| | GGCTCTTATATTTGGTGCTATGTAAATGAAAATGTTTTTTAGGTTTTCTTGATTTAACAATAGAGACAGG | |
| | GTCTCCCTGTGTTGCCCAGGCTGGTCTCGAACTCCTGGGCTCAAGAGATCCTCCTGTCTTGGCCTCGCAA | |
| | AGTGCTAAGTAGGATTACAGGCGTTAGCCACCACACCCGGCTGTAAAAATGTACTTATTCTCCAGCCTCT | |
| | TTTGTATAAACCATAGTAAGGGATGGGAGTAATGATGTTATCTGTGAAAATAGCCACCATTTACCCGTAA | |
| | GACAAAACTTGTTAAAGCCTCCTGAGTCTAACCTAGATTACATCAGGCCCTTTTTCACACACAAAAAAAT | |
| | CCTTTATGGGATTTAATGGAATCTGTTGTTTCCCCCTAAGTTGAAAAACAACTCTAAGACACTTTAAAGT | |
| | ACCTTCTTGGCCTGGGTTACATGGTTCCCAGCCTAGGTTTCAGACTTTTGCTTAAGGCCAGTTTTAGAAA | |
| | CCCGTGAATTCAGAAAAGTTAATTCAGAAATTTGATAAACAGAATTGTTATTTAAAAACTAACTGGAAAG | |
| | ATTGTTAAGTTCTTTCTGAATTATTCAGAAATTATGCATCATTTTCCTTCAAGAATGACAGGGTCAGCAT | |
| | GTGGAATTCCAAGATACCTCTTGACTTCCTCTCAAGCTCCGTGTTTGGTCAGTGGAGGCCCATCCGAGCT | |
| | CAGCACTGAGAAGTGTTAGTTTCTTTGGGACCCATCTACCCTGACCACATCATGATGTTCATCTGCAGCT | |
| | GTTGCAAGGTGTTCAGATTGTATAAACATAAATGTCACAAAAACTTTAAAAGAAGTGCAATTCTCAAAAG | |
| | GTTAGGTGGACTAAAGCATTCTGTAAAGCAACTGCTAATAATGAGCTTACAGTGGATTTGAATTTGAAAA | |
| | ATATAGTAACAAGCCTGTCAAATATCTGCAAGAACTATGGAATAAAACTACTGATGCAGTGAAGACAGTT | |
| | GAAAAGATCAAACAAATGCCAAGCTATATTTATAATGAACAAATTCAAGAAAAAGGACTACGGAAAGTTC | |
| | AGGACATCAAAGAAGTCAGGCAAAACTCATCTTGACCCCTGTTGCAGGCAAAGGAACGCAGCTGGAAGAA | |
| | AAGATGATATAACAGTTAACAGGATGCAGACATGGCAGAGGTTTCCTAAAAATCTCATTATCTATAACCA | |
| | TTTCTATATTTACATTTGAAAATCTCCTTTGGAGACTTAGAACCTCTAAATTATTGACTTATTTTTTATA | |
| | TAAGGTCACTCCGATGAAAGGTGATTACAAAATCATCTACATTGCTGTCTACAAAACAGATAATATGGAT | |
| | GTTTGATCGCATCTCATTGTTAACTCTTTACTGATATGTTTGTAAATACAGAAGTGAAATGTGGACATAA | |
| | AATAGTTACGCTATTTGGTTAATGGTACTAGACAACATGTAATTAATGACATTCAAAAATTTATGGCTAG | |
| | TGATATATATAAAGTAAAATTTTCTTTGCAGTAAAATATGCCCTTTATTATAGAAGGGAGGATATAAGGA | |
| | ACCAACAGTTTGTATGAAAATAGCTCAAATAATATCTTTTATTTTGATTTTAATATTTCTTATTTTGGTT | |
| | TATTAGTGTCTTAGAACAAAATGGCCTTATATAATGAAGCCTAGTTATGCTGGACTGTTTTGATCTCTTT | |
| | TAATTGTTCTGACAGATAGTTGGGGATGAGAGCCGAATAAGGTTTGCCTGAAATAACTGACACTATATAA | |
| | TTTCTGCTTTGGCAAATACTAAGTTCTAACTTGTCATTCCTGGTAGAACAAGCTTTATTTTTCGAGCCTA | |
| | GCAATGATCTAGAAGCAGATGTTATCTCAGTGCCTTTTGCAATTTGTTGTGTGGGTTTTTTTTTTTTTAA | |
| | AGCCACACAATAATTTTGGAAAACAATGTATGGGTAGAACATGTGTCTGTTAATTGCACACAAAACCACT | |
| | TTTAATGGGTACAGAGTTAAATTTGAAGGAATAAGTTCTAGCTGAAGTATTATGAACTCCAAATAATGCT | |
| | TTGAGGACCTCCAAAGGTAAAAGTACTAATCCCTTTGGCCATTTATTGAGAGAGAGAGAGAGAGAGAGTA | |
| | GGGTGACTATAGTTAATGTATTGAATGTTCTTGCTACAAATAAATGATATTTGAGCTGATGGGTGTGCTA | |
| | ATTACACTGATTTGATCAATACCCATTGTATGTGAAACAGTACATACACCATATTTACAATTATGTATTT | |
| | AACATTTAAAATTTCTAATATAAGTATCTCTCAAACTGTGGATTAACTTCTTGATTTATATTTAAATATG | |
| | AATCTTAAGCAAAACAGTGAAAATAACCATCTTGATTTAGTGTTTTTCTCCCATATGTGAATTGTATATA | |
| | CTTAGGTGAAGACAATAAAATCAACTGAACTGTAAGCTTAGAATAGGACTGAGGTAATTCTGCACAGCAA | |
| | CTTTACTAATGGTACATTGTTGCTTCAAAACTCTCTCTCTCTCTCTCTGTCTGTCTCAATAAATGGCCAA | |
| | AGGGATTAGTAGTTTACCTGTGGAGGTCCTCCAAGCATTATTTGGAGTTGATAATACTTCAGCTACAACC | |
| | AAGCAGAATCTCTTTTTTTTGGAGGTCCTCGAAGCATTATTTGGAGTTGATAATACTTCAGCTTCAATTT | |
| | GGAGTTGATAATATTTCAGCTAGAACCTAGTAGAATCTGTTTTTTTCCTTTGGAGGTCCTCAAAGCATTA | |
| | TTGGAGTTCATAATACTGAAGCTAGAACCAAGCAGAATCTGTTTTTTTCTGAGGAGTATCGGTAGCATAA | |
| | ATGTGATTATAAACATAGTACACTTGATATATGGAGGCAGTGACAGCTATTTTTACAAAATTTAAATCTG | |
| | CAAATGGATTCAACATGTTTATGGGTTATTAAAATTGTCTGATTTCTTAGGTTCTTTATAGTACACGTGT | |
| | TGAAAATAAATGATTAAGAATTGTTTCAAGAATGCAATTATTTGATCTTAAATTTTTATGAGTTGTTAAA | |
| | ATAGAAATTATTTGAATATCATATATTTGGGTAACAAAAGGCACAAGTCTGAATGTGTTTCTTTTTCTGG | |
| | AATGGCCATGCCTGCCCACTTTAGAAATACAAATATCACTGGGCAGCTTGAAGCAGTTGGGAGCCTCCAA | |
| | TGAGAGCAACTTGAGAGAATGATGTTGCAAGTTAGTAGGAGTAAGAAATGCTGTGTTCTCCCTGTCTTCT | |
| | CTTAGGTCACATGGCAGCCTGGCCTAAGTGATCGTGAATGGTCTATAAGGGAGGTAGCTGGGACAGGGAG | |
| | GGGAGTTTGGGCTAGCCACCGTACCACTTGTCAGCGTGAAAAGTAAGATTGTAATTGCCTGTTTAGTTTT | |
| | CTGCCTCATCTTTGAAAGTTCCACCAAGCTGGGAACCTCTTGATTGTGAGGCACAAATGTAAGTACATCA | |
| | GAAAAAAACAAAAAAACTGGCTTTAAAGCAGGAGCTTGTGGGCCCCTAAGCCAGACGGGGACTAGCTTTT | |
| | GGCATTATATAATTAAGATTTTTTAAATCCTTAATAAGGGTTTTATTTTATTTTTATTTATTTTTTGAGA | |
| | CGGAGTCTTGCTCTGTGGCTCAGGCTGGAGTACAGTGGTGCAATCTTGGCTCACTGCAACCTCTGCCTCC | |
| | TGGCTGTGTTCAAGTGGTTCTGCTTCAGCCTCCCAAGTAGCTGGGGTTAGAGCACCCTGTCACCACGCCC | |
| | CGCTAATTTTTGTATTTCTAGCAGAGATGAAGTTTCACTATGTTGGCCAGGCTGGGCTCAAACTCCTGAC | |
| | CTCAAGTGATCTGCCCGCCTTGGCCCCCCAAAGTGCTGTGATTACAGGCGTGAGCCGCCACGCCCAGCCT | |
| | AATAAGGGTTTTAAAGATAATTAGTGTGTAGGTCTGTAGGCTTATGATGGTAACCACAAGTTGTTAATGG | |
| | CATTGTGAAAAGTTTTTAGTTGCGCTTTATGGGTGGATGCTGAATTACATTTTGATTTGATACTTATAAA | |
| | AAGAAAAAGTATTTCTTCAGCTTAAAAAATTGTTTAAAAGTTTGTGATCATATTGTCTACCATGTAGCCA | |
| | GCTTTCAATTATATGTAAGAGGGACTTTTTGACATTTACAAATAATACTTTGAGGTAGATATCTGAAAGC | |
| | ACCAGCACTTGGAAGGTGTTCAGAAGTAACAAATTATAAAATGAGCTAACAAACGAAAGGCAAAATAAAA | |
| | CCGTAAAGCAAGCAGATGGGAGGCGTGTTCAGTAACTTATTCATAATGCATCTGAAATGATTGCTGTACT | |
| | CAAATATTTAACGTTAGAGTAATAGTATTTTGAATGAAAACCATAGTTGATT | |
| PTEN | CCTCCCCTCGCCCGGCGCGGTCCCGTCCGCCTCTCGCTCGCCTCCCGCCTCCCCTCGGTCTTCCGAGGCG | 37 |
| NM_000314.4 | CCCGGGCTCCCGGCGCGGCGGCGGAGGGGGCGGGCAGGCCGGCGGGCGGTGATGTGGCGGGACTCTTTAT | |
| | GCGCTGCGGCAGGATACGCGCTCGGCGCTGGGACGCGACTGCGCTCAGTTCTCTCCTCTCGGAAGCTGCA | |
| | GCCATGATGGAAGTTTGAGAGTTGAGCCGCTGTGAGGCGAGGCCGGGCTCAGGCGAGGGAGATGAGAGAC | |
| | GGCGGCGGCCGCGGCCCGGAGCCCCTCTCAGCGCCTGTGAGCAGCCGCGGGGGCAGCGCCCTCGGGGAGC | |
| | CGGCCGGCCTGCGGCGGCGGCAGCGGCGGCGTTTCTCGCCTCCTCTTCGTCTTTTCTAACCGTGCAGCCT | |
| | CTTCCTCGGCTTCTCCTGAAAGGGAAGGTGGAAGCCGTGGGCTCGGGCGGGAGCCGGCTGAGGCGCGGCG | |
| | GCGGCGGCGGCACCTCCCGCTCCTGGAGCGGGGGGGAGAAGCGGCGGCGGCGGCGGCCGCGGCGGCTGCA | |
| | GCTCCAGGGAGGGGGTCTGAGTCGCCTGTCACCATTTCCAGGGCTGGGAACGCCGGAGAGTTGGTCTCTC | |
| | CCCTTCTACTGCCTCCAACACGGCGGCGGCGGCGGCGGCACATCCAGGGACCCGGGCCGGTTTTAAACCT | |
| | CCCGTCCGCCGCCGCCGCACCCCCCGTGGCCCGGGCTCCGGAGGCCGCCGGCGGAGGCAGCCGTTCGGAG | |
| | GATTATTCGTCTTCTCCCCATTCCGCTGCCGCCGCTGCCAGGCCTCTGGCTGCTGAGGAGAAGCAGGCCC | |
| | AGTCGCTGCAACCATCCAGCAGCCGCCGCAGCAGCCATTACCCGGCTGCGGTCCAGAGCCAAGCGGCGGC | |
| | AGAGCGAGGGGCATCAGCTACCGCCAAGTCCAGAGCCATTTCCATCCTGCAGAAGAAGCCCCGCCACCAG | |
| | CAGCTTCTGCCATCTCTCTCCTCCTTTTTCTTCAGCCACAGGCTCCCAGACATGACAGCCATCATCAAAG | |
| | AGATCGTTAGCAGAAACAAAAGGAGATATCAAGAGGATGGATTCGACTTAGACTTGACCTATATTTATCC | |
| | AAACATTATTGCTATGGGATTTCCTGCAGAAAGACTTGAAGGCGTATACAGGAACAATATTGATGATGTA | |
| | GTAAGGTTTTTGGATTCAAAGCATAAAAACCATTACAAGATATACAATCTTTGTGCTGAAAGACATTATG | |
| | ACACCGCCAAATTTAATTGCAGAGTTGCACAATATCCTTTTGAAGACCATAACCCACCACAGCTAGAACT | |
| | TATCAAACCCTTTTGTGAAGATCTTGACCAATGGCTAAGTGAAGATGACAATCATGTTGCAGCAATTCAC | |
| | TGTAAAGCTGGAAAGGGACGAACTGGTGTAATGATATGTGCATATTTATTACATCGGGGCAAATTTTTAA | |
| | AGGCACAAGAGGCCCTAGATTTCTATGGGGAAGTAAGGACCAGAGACAAAAAGGGAGTAACTATTCCCAG | |
| | TCAGAGGCGCTATGTGTATTATTATAGCTACCTGTTAAAGAATCATCTGGATTATAGACCAGTGGCACTG | |
| | TTGTTTCACAAGATGATGTTTGAAACTATTCCAATGTTCAGTGGCGGAACTTGCAATCCTCAGTTTGTGG | |
| | TCTGCCAGCTAAAGGTGAAGATATATTCCTCCAATTCAGGACCCACACGACGGGAAGACAAGTTCATGTA | |
| | CTTTGAGTTCCCTCAGCCGTTACCTGTGTGTGGTGATATCAAAGTAGAGTTCTTCCACAAACAGAACAAG | |
| | ATGCTAAAAAAGGACAAAATGTTTCACTTTTGGGTAAATACATTCTTCATACCAGGACCAGAGGAAACCT | |
| | CAGAAAAAGTAGAAAATGGAAGTCTATGTGATCAAGAAATCGATAGCATTTGCAGTATAGAGCGTGCAGA | |
| | TAATGACAAGGAATATCTAGTACTTACTTTAACAAAAAATGATCTTGACAAAGCAAATAAAGACAAAGCC | |
| | AACCGATACTTTTCTCCAAATTTTAAGGTGAAGCTGTACTTCACAAAAACAGTAGAGGAGCCGTCAAATC | |
| | CAGAGGCTAGCAGTTCAACTTCTGTAACACCAGATGTTAGTGACAATGAACCTGATCATTATAGATATTC | |
| | TGACACCACTGACTCTGATCCAGAGAATGAACCTTTTGATGAAGATCAGCATACACAAATTACAAAAGTC | |
| | TGAATTTTTTTTTATCAAGAGGGATAAAACACCATGAAAATAAACTTGAATAAACTGAAAATGGACCTTT | |
| | TTTTTTTTAATGGCAATAGGACATTGTGTCAGATTACCAGTTATAGGAACAATTCTCTTTTCCTGACCAA | |
| | TCTTGTTTTACCCTATACATCCACAGGGTTTTGACACTTGTTGTCCAGTTGAAAAAAGGTTGTGTAGCTG | |
| | TGTCATGTATATACCTTTTTGTGTCAAAAGGACATTTAAAATTCAATTAGGATTAATAAAGATGGCACTT | |
| | TCCCGTTTTATTCCAGTTTTATAAAAAGTGGAGACAGACTGATGTGTATACGTAGGAATTTTTTCCTTTT | |
| | GTGTTCTGTCACCAACTGAAGTGGCTAAAGAGCTTTGTGATATACTGGTTCACATCCTACCCCTTTGCAC | |
| | TTGTGGCAACAGATAAGTTTGCAGTTGGCTAAGAGAGGTTTCCGAAGGGTTTTGCTACATTCTAATGCAT | |
| | GTATTCGGGTTAGGGGAATGGAGGGAATGCTCAGAAAGGAAATAATTTTATGCTGGACTCTGGACCATAT | |
| | ACCATCTCCAGCTATTTACACACACCTTTCTTTAGCATGCTACAGTTATTAATCTGGACATTCGAGGAAT | |
| | TGGCCGCTGTCACTGCTTGTTGTTTGCGCATTTTTTTTTAAAGCATATTGGTGCTAGAAAAGGCAGCTAA | |
| | AGGAAGTGAATCTGTATTGGGGTACAGGAATGAACCTTCTGCAACATCTTAAGATCCACAAATGAAGGGA | |
| | TATAAAAATAATGTCATAGGTAAGAAACACAGCAACAATGACTTAACCATATAAATGTGGAGGCTATCAA | |
| | CAAAGAATGGGCTTGAAACATTATAAAAATTGACAATGATTTATTAAATATGTTTTCTCAATTGTAACGA | |
| | CTTCTCCATCTCCTGTGTAATCAAGGCCAGTGCTAAAATTCAGATGCTGTTAGTACCTACATCAGTCAAC | |
| | AACTTACACTTATTTTACTAGTTTTCAATCATAATACCTGCTGTGGATGCTTCATGTGCTGCCTGCAAGC | |
| | TTCTTTTTTCTCATTAAATATAAAATATTTTGTAATGCTGCACAGAAATTTTCAATTTGAGATTCTACAG | |
| | TAAGCGTTTTTTTTCTTTGAAGATTTATGATGCACTTATTCAATAGCTGTCAGCCGTTCCACCCTTTTGA | |
| | CCTTACACATTCTATTACAATGAATTTTGCAGTTTTGCACATTTTTTAAATGTCATTAACTGTTAGGGAA | |
| | TTTTACTTGAATACTGAATACATATAATGTTTATATTAAAAAGGACATTTGTGTTAAAAAGGAAATTAGA | |
| | GTTGCAGTAAACTTTCAATGCTGCACACAAAAAAAAGACATTTGATTTTTCAGTAGAAATTGTCCTACAT | |
| | GTGCTTTATTGATTTGCTATTGAAAGAATAGGGTTTTTTTTTTTTTTTTTTTTTTTTTTTTTAAATGTGC | |
| | AGTGTTGAATCATTTCTTCATAGTGCTCCCCCGAGTTGGGACTAGGGCTTCAATTTCACTTCTTAAAAAA | |
| | AATCATCATATATTTGATATGCCCAGACTGCATACGATTTTAAGCGGAGTACAACTACTATTGTAAAGCT | |
| | AATGTGAAGATATTATTAAAAAGGTTTTTTTTTCCAGAAATTTGGTGTCTTCAAATTATACCTTCACCTT | |
| | GACATTTGAATATCCAGCCATTTTGTTTCTTAATGGTATAAAATTCCATTTTCAATAACTTATTGGTGCT | |
| | GAAATTGTTCACTAGCTGTGGTCTGACCTAGTTAATTTACAAATACAGATTGAATAGGACCTACTAGAGC | |
| | AGCATTTATAGAGTTTGATGGCAAATAGATTAGGCAGAACTTCATCTAAAATATTCTTAGTAAATAATGT | |
| | TGACACGTTTTCCATACCTTGTCAGTTTCATTCAACAATTTTTAAATTTTTAACAAAGCTCTTAGGATTT | |
| | ACACATTTATATTTAAACATTGATATATAGAGTATTGATTGATTGCTCATAAGTTAAATTGGTAAAGTTA | |
| | GAGACAACTATTCTAACACCTCACCATTGAAATTTATATGCCACCTTGTCTTTCATAAAAGCTGAAAATT | |
| | GTTACCTAAAATGAAAATCAACTTCATGTTTTGAAGATAGTTATAAATATTGTTCTTTGTTACAATTTCG | |
| | GGCACCGCATATTAAAACGTAACTTTATTGTTCCAATATGTAACATGGAGGGCCAGGTCATAAATAATGA | |
| | CATTATAATGGGCTTTTGCACTGTTATTATTTTTCCTTTGGAATGTGAAGGTCTGAATGAGGGTTTTGAT | |
| | TTTGAATGTTTCAATGTTTTTGAGAAGCCTTGCTTACATTTTATGGTGTAGTCATTGGAAATGGAAAAAT | |
| | GGCATTATATATATTATATATATAAATATATATTATACATACTCTCCTTACTTTATTTCAGTTACCATCC | |
| | CCATAGAATTTGACAAGAATTGCTATGACTGAAAGGTTTTCGAGTCCTAATTAAAACTTTATTTATGGCA | |
| | GTATTCATAATTAGCCTGAAATGCATTCTGTAGGTAATCTCTGAGTTTCTGGAATATTTTCTTAGACTTT | |
| | TTGGATGTGCAGCAGCTTACATGTCTGAAGTTACTTGAAGGCATCACTTTTAAGAAAGCTTACAGTTGGG | |
| | CCCTGTACCATCCCAAGTCCTTTGTAGCTCCTCTTGAACATGTTTGCCATACTTTTAAAAGGGTAGTTGA | |
| | ATAAATAGCATCACCATTCTTTGCTGTGGCACAGGTTATAAACTTAAGTGGAGTTTACCGGCAGCATCAA | |
| | ATGTTTCAGCTTTAAAAAATAAAAGTAGGGTACAAGTTTAATGTTTAGTTCTAGAAATTTTGTGCAATAT | |
| | GTTCATAACGATGGCTGTGGTTGCCACAAAGTGCCTCGTTTACCTTTAAATACTGTTAATGTGTCATGCA | |
| | TGCAGATGGAAGGGGTGGAACTGTGCACTAAAGTGGGGGCTTTAACTGTAGTATTTGGCAGAGTTGCCTT | |
| | CTACCTGCCAGTTCAAAAGTTCAACCTGTTTTCATATAGAATATATATACTAAAAAATTTCAGTCTGTTA | |
| | AACAGCCTTACTCTGATTCAGCCTCTTCAGATACTCTTGTGCTGTGCAGCAGTGGCTCTGTGTGTAAATG | |
| | CTATGCACTGAGGATACACAAAAATACCAATATGATGTGTACAGGATAATGCCTCATCCCAATCAGATGT | |
| | CCATTTGTTATTGTGTTTGTTAACAACCCTTTATCTCTTAGTGTTATAAACTCCACTTAAAACTGATTAA | |
| | AGTCTCATTCTTGTCAAAAAAAAAAAAAAAAAAAAAAAAAAA | |
| TP53 | GATGGGATTGGGGTTTTCCCCTCCCATGTGCTCAAGACTGGCGCTAAAAGTTTTGAGCTTCTCAAAAGTC | 38 |
| NM_000546.5 | TAGAGCCACCGTCCAGGGAGCAGGTAGCTGCTGGGCTCCGGGGACACTTTGCGTTCGGGCTGGGAGCGTG | |
| | CTTTCCACGACGGTGACACGCTTCCCTGGATTGGCAGCCAGACTGCCTTCCGGGTCACTGCCATGGAGGA | |
| | GCCGCAGTCAGATCCTAGCGTCGAGCCCCCTCTGAGTCAGGAAACATTTTCAGACCTATGGAAACTACTT | |
| | CCTGAAAACAACGTTCTGTCCCCCTTGCCGTCCCAAGCAATGGATGATTTGATGCTGTCCCCGGACGATA | |
| | TTGAACAATGGTTCACTGAAGACCCAGGTCCAGATGAAGCTCCCAGAATGCCAGAGGCTGCTCCCCCCGT | |
| | GGCCCCTGCACCAGCAGCTCCTACACCGGCGGCCCCTGCACCAGCCCCCTCCTGGCCCCTGTCATCTTCT | |
| | GTCCCTTCCCAGAAAACCTACCAGGGCAGCTACGGTTTCCGTCTGGGCTTCTTGCATTCTGGGACAGCCA | |
| | AGTCTGTGACTTGCACGTACTCCCCTGCCCTCAACAAGATGTTTTGCCAACTGGCCAAGACCTGCCCTGT | |
| | GCAGCTGTGGGTTGATTCCACACCCCCGCCCGGCACCCGCGTCCGCGCCATGGCCATCTACAAGCAGTCA | |
| | CAGCACATGACGGAGGTTGTGAGGCGCTGCCCCCACCATGAGCGCTGCTCAGATAGCGATGGTCTGGCCC | |
| | CTCCTCAGCATCTTATCCGAGTGGAAGGAAATTTGCGTGTGGAGTATTTGGATGACAGAAACACTTTTCG | |
| | ACATAGTGTGGTGGTGCCCTATGAGCCGCCTGAGGTTGGCTCTGACTGTACCACCATCCACTACAACTAC | |
| | ATGTGTAACAGTTCCTGCATGGGCGGCATGAACCGGAGGCCCATCCTCACCATCATCACACTGGAAGACT | |
| | CCAGTGGTAATCTACTGGGACGGAACAGCTTTGAGGTGCGTGTTTGTGCCTGTCCTGGGAGAGACCGGCG | |
| | CACAGAGGAAGAGAATCTCCGCAAGAAAGGGGAGCCTCACCACGAGCTGCCCCCAGGGAGCACTAAGCGA | |
| | GCACTGCCCAACAACACCAGCTCCTCTCCCCAGCCAAAGAAGAAACCACTGGATGGAGAATATTTCACCC | |
| | TTCAGATCCGTGGGCGTGAGCGCTTCGAGATGTTCCGAGAGCTGAATGAGGCCTTGGAACTCAAGGATGC | |
| | CCAGGCTGGGAAGGAGCCAGGGGGGAGCAGGGCTCACTCCAGCCACCTGAAGTCCAAAAAGGGTCAGTCT | |
| | ACCTCCCGCCATAAAAAACTCATGTTCAAGACAGAAGGGCCTGACTCAGACTGACATTCTCCACTTCTTG | |
| | TTCCCCACTGACAGCCTCCCACCCCCATCTCTCCCTCCCCTGCCATTTTGGGTTTTGGGTCTTTGAACCC | |
| | TTGCTTGCAATAGGTGTGCGTCAGAAGCACCCAGGACTTCCATTTGCTTTGTCCCGGGGCTCCACTGAAC | |
| | AAGTTGGCCTGCACTGGTGTTTTGTTGTGGGGAGGAGGATGGGGAGTAGGACATACCAGCTTAGATTTTA | |
| | AGGTTTTTACTGTGAGGGATGTTTGGGAGATGTAAGAAATGTTCTTGCAGTTAAGGGTTAGTTTACAATC | |
| | AGCCACATTCTAGGTAGGGGCCCACTTCACCGTACTAACCAGGGAAGCTGTCCCTCACTGTTGAATTTTC | |
| | TCTAACTTCAAGGCCCATATCTGTGAAATGCTGGCATTTGCACCTACCTCACAGAGTGCATTGTGAGGGT | |
| | TAATGAAATAATGTACATCTGGCCTTGAAACCACCTTTTATTACATGGGGTCTAGAACTTGACCCCCTTG | |
| | AGGGTGCTTGTTCCCTCTCCCTGTTGGTCGGTGGGTTGGTAGTTTCTACAGTTGGGCAGCTGGTTAGGTA | |
| | GAGGGAGTTGTCAAGTCTCTGCTGGCCCAGCCAAACCCTGTCTGACAACCTCTTGGTGAACCTTAGTACC | |
| | TAAAAGGAAATCTCACCCCATCCCACACCCTGGAGGATTTCATCTCTTGTATATGATGATCTGGATCCAC | |
| | CAAGACTTGTTTTATGCTCAGGGTCAATTTCTTTTTTCTTTTTTTTTTTTTTTTTTCTTTTTCTTTGAGA | |
| | CTGGGTCTCGCTTTGTTGCCCAGGCTGGAGTGGAGTGGCGTGATCTTGGCTTACTGCAGCCTTTGCCTCC | |
| | CCGGCTCGAGCAGTCCTGCCTCAGCCTCCGGAGTAGCTGGGACCACAGGTTCATGCCACCATGGCCAGCC | |
| | AACTTTTGCATGTTTTGTAGAGATGGGGTCTCACAGTGTTGCCCAGGCTGGTCTCAAACTCCTGGGCTCA | |
| | GGCGATCCACCTGTCTCAGCCTCCCAGAGTGCTGGGATTACAATTGTGAGCCACCACGTCCAGCTGGAAG | |
| | GGTCAACATCTTTTACATTCTGCAAGCACATCTGCATTTTCACCCCACCCTTCCCCTCCTTCTCCCTTTT | |
| | TATATCCCATTTTTATATCGATCTCTTATTTTACAATAAAACTTTGCTGCCACCTGTGTGTCTGAGGGGT | |
| | G | |
| CDC6 | GAGCGCGGCTGGAGTTTGCTGCTGCCGCTGTGCAGTTTGTTCAGGGGCTTGTGGTGGTGAGTCCGAGAGG | 39 |
| NM_001254.3 | CTGCGTGTGAGAGACGTGAGAAGGATCCTGCACTGAGGAGGTGGAAAGAAGAGGATTGCTCGAGGAGGCC | |
| | TGGGGTCTGTGAGGCAGCGGAGCTGGGTGAAGGCTGCGGGTTCCGGCGAGGCCTGAGCTGTGCTGTCGTC | |
| | ATGCCTCAAACCCGATCCCAGGCACAGGCTACAATCAGTTTTCCAAAAAGGAAGCTGTCTCGGGCATTGA | |
| | ACAAAGCTAAAAACTCCAGTGATGCCAAACTAGAACCAACAAATGTCCAAACCGTAACCTGTTCTCCTCG | |
| | TGTAAAAGCCCTGCCTCTCAGCCCCAGGAAACGTCTGGGCGATGACAACCTATGCAACACTCCCCATTTA | |
| | CCTCCTTGTTCTCCACCAAAGCAAGGCAAGAAAGAGAATGGTCCCCCTCACTCACATACACTTAAGGGAC | |
| | GAAGATTGGTATTTGACAATCAGCTGACAATTAAGTCTCCTAGCAAAAGAGAACTAGCCAAAGTTCACCA | |
| | AAACAAAATACTTTCTTCAGTTAGAAAAAGTCAAGAGATCACAACAAATTCTGAGCAGAGATGTCCACTG | |
| | AAGAAAGAATCTGCATGTGTGAGACTATTCAAGCAAGAAGGCACTTGCTACCAGCAAGCAAAGCTGGTCC | |
| | TGAACACAGCTGTCCCAGATCGGCTGCCTGCCAGGGAAAGGGAGATGGATGTCATCAGGAATTTCTTGAG | |
| | GGAACACATCTGTGGGAAAAAAGCTGGAAGCCTTTACCTTTCTGGTGCTCCTGGAACTGGAAAAACTGCC | |
| | TGCTTAAGCCGGATTCTGCAAGACCTCAAGAAGGAACTGAAAGGCTTTAAAACTATCATGCTGAATTGCA | |
| | TGTCCTTGAGGACTGCCCAGGCTGTATTCCCAGCTATTGCTCAGGAGATTTGTCAGGAAGAGGTATCCAG | |
| | GCCAGCTGGGAAGGACATGATGAGGAAATTGGAAAAACATATGACTGCAGAGAAGGGCCCCATGATTGTG | |
| | TTGGTATTGGACGAGATGGATCAACTGGACAGCAAAGGCCAGGATGTATTGTACACGCTATTTGAATGGC | |
| | CATGGCTAAGCAATTCTCACTTGGTGCTGATTGGTATTGCTAATACCCTGGATCTCACAGATAGAATTCT | |
| | ACCTAGGCTTCAAGCTAGAGAAAAATGTAAGCCACAGCTGTTGAACTTCCCACCTTATACCAGAAATCAG | |
| | ATAGTCACTATTTTGCAAGATCGACTTAATCAGGTATCTAGAGATCAGGTTCTGGACAATGCTGCAGTTC | |
| | AATTCTGTGCCCGCAAAGTCTCTGCTGTTTCAGGAGATGTTCGCAAAGCACTGGATGTTTGCAGGAGAGC | |
| | TATTGAAATTGTAGAGTCAGATGTCAAAAGCCAGACTATTCTCAAACCACTGTCTGAATGTAAATCACCT | |
| | TCTGAGCCTCTGATTCCCAAGAGGGTTGGTCTTATTCACATATCCCAAGTCATCTCAGAAGTTGATGGTA | |
| | ACAGGATGACCTTGAGCCAAGAAGGAGCACAAGATTCCTTCCCTCTTCAGCAGAAGATCTTGGTTTGCTC | |
| | TTTGATGCTCTTGATCAGGCAGTTGAAAATCAAAGAGGTCACTCTGGGGAAGTTATATGAAGCCTACAGT | |
| | AAAGTCTGTCGCAAACAGCAGGTGGCGGCTGTGGACCAGTCAGAGTGTTTGTCACTTTCAGGGCTCTTGG | |
| | AAGCCAGGGGCATTTTAGGATTAAAGAGAAACAAGGAAACCCGTTTGACAAAGGTGTTTTTCAAGATTGA | |
| | AGAGAAAGAAATAGAACATGCTCTGAAAGATAAAGCTTTAATTGGAAATATCTTAGCTACTGGATTGCCT | |
| | TAAATTCTTCTCTTACACCCCACCCGAAAGTATTCAGCTGGCATTTAGAGAGCTACAGTCTTCATTTTAG | |
| | TGCTTTACACATTCGGGCCTGAAAACAAATATGACCTTTTTTACTTGAAGCCAATGAATTTTAATCTATA | |
| | GATTCTTTAATATTAGCACAGAATAATATCTTTGGGTCTTACTATTTTTACCCATAAAAGTGACCAGGTA | |
| | GACCCTTTTTAATTACATTCACTACTTCTACCACTTGTGTATCTCTAGCCAATGTGCTTGCAAGTGTACA | |
| | GATCTGTGTAGAGGAATGTGTGTATATTTACCTCTTCGTTTGCTCAAACATGAGTGGGTATTTTTTTGTT | |
| | TGTTTTTTTTGTTGTTGTTGTTTTTGAGGCGCGTCTCACCCTGTTGCCCAGGCTGGAGTGCAATGGCGCG | |
| | TTCTCTGCTCACTACAGCACCCGCTTCCCAGGTTGAAGTGATTCTCTTGCCTCAGCCTCCCGAGTAGCTG | |
| | GGATTACAGGTGCCCACCACCGCGCCCAGCTAATTTTTTAATTTTTAGTAGAGACAGGGTTTTACCATGT | |
| | TGGCCAGGCTGGTCTTGAACTCCTGACCCTCAAGTGATCTGCCCACCTTGGCCTCCCTAAGTGCTGGGAT | |
| | TATAGGCGTGAGCCACCATGCTCAGCCATTAAGGTATTTTGTTAAGAACTTTAAGTTTAGGGTAAGAAGA | |
| | ATGAAAATGATCCAGAAAAATGCAAGCAAGTCCACATGGAGATTTGGAGGACACTGGTTAAAGAATTTAT | |
| | TTCTTTGTATAGTATACTATGTTCATGGTGCAGATACTACAACATTGTGGCATTTTAGACTCGTTGAGTT | |
| | TCTTGGGCACTCCCAAGGGCGTTGGGGTCATAAGGAGACTATAACTCTACAGATTGTGAATATATTTATT | |
| | TTCAAGTTGCATTCTTTGTCTTTTTAAGCAATCAGATTTCAAGAGAGCTCAAGCTTTCAGAAGTCAATGT | |
| | GAAAATTCCTTCCTAGGCTGTCCCACAGTCTTTGCTGCCCTTAGATGAAGCCACTTGTTTCAAGATGACT | |
| | ACTTTGGGGTTGGGTTTTCATCTAAACACATTTTTCCAGTCTTATTAGATAAATTAGTCCATATGGTTGG | |
| | TTAATCAAGAGCCTTCTGGGTTTGGTTTGGTGGCATTAAATGG | |
| KIF13B | GAAGAGTCGCCGGTGGCCGCGGCAGACGGAAGCCGAACGAGTTCCTCGGCGGCTGCAGGATGGGGGACTC | 40 |
| NM_015254.3 | CAAAGTGAAAGTGGCGGTGCGGATACGACCCATGAACCGGCGAGAGACTGACTTGCATACCAAATGTGTG | |
| | GTGGATGTGGATGCAAACAAGGTTATTCTTAATCCTGTAAATACGAATCTTTCCAAAGGAGATGCCCGGG | |
| | GCCAGCCGAAGGTGTTTGCTTATGATCATTGTTTCTGGTCTATGGATGAATCTGTCAAAGAAAAGTATGC | |
| | AGGTCAAGATATTGTTTTCAAGTGCCTTGGAGAGAATATCCTGCAGAATGCTTTTGATGGCTACAATGCA | |
| | TGTATCTTTGCCTATGGACAGACTGGCTCTGGAAAATCTTATACCATGATGGGCACAGCTGACCAACCTG | |
| | GATTAATCCCAAGACTTTGCAGTGGACTCTTTGAACGAACTCAGAAAGAGGAAAATGAAGAACAGAGTTT | |
| | TAAAGTAGAAGTGTCCTACATGGAAATTTATAATGAAAAAGTTCGAGACCTTCTTGATCCCAAAGGAAGC | |
| | CGTCAGACGTTGAAAGTCAGAGAGCATAGTGTGTTGGGACCTTATGTCGACGGACTTTCTAAACTGGCTG | |
| | TCACAAGCTACAAGGATATTGAGTCGTTGATGTCTGAGGGTAACAAATCTCGCACAGTTGCTGCAACCAA | |
| | CATGAACGAGGAGAGTAGCCGATCCCATGCAGTTTTCAAAATCACCCTCACACATACTCTCTACGATGTG | |
| | AAGTCTGGGACATCTGGAGAGAAAGTGGGCAAACTCAGCCTGGTGGATTTAGCTGGCAGTGAACGAGCAA | |
| | CGAAGACAGGCGCTGCAGGGGACAGGCTGAAGGAAGGGAGCAACATTAACAAGTCCCTCACAACCCTCGG | |
| | TCTGGTTATCTCAGCTCTTGCAGATCAGAGTGCTGGCAAAAACAAGAATAAATTTGTTCCATATCGTGAC | |
| | TCAGTTCTCACTTGGCTGCTCAAAGACAGCCTCGGGGGTAACAGCAAGACCGCCATGGTGGCTACTGTGA | |
| | GTCCTGCAGCTGATAACTATGATGAAACCCTCTCAACTCTGCGGTATGCAGATCGAGCCAAGCACATTGT | |
| | AAACCACGCTGTGGTGAATGAGGACCCTAATGCCCGAATTATCCGGGATCTCCGGGAAGAAGTTGAGAAA | |
| | CTCCGGGAGCAGCTGACCAAAGCAGAGGCAATGAAATCTCCAGAGCTAAAGGACCGGCTGGAAGAATCTG | |
| | AGAAGCTAATCCAGGAAATGACTGTGACCTGGGAGGAGAAATTAAGGAAAACGGAGGAGATTGCACAGGA | |
| | ACGACAGAAACAGCTTGAGAGTCTTGGAATATCTCTTCAGTCTTCGGGAATCAAAGTTGGGGATGATAAA | |
| | TGCTTCCTTGTGAATCTGAATGCTGACCCAGCTCTGAATGAGCTTCTGGTGTACTATTTAAAGGAACATA | |
| | CATTGATAGGGTCAGCAAATTCCCAAGATATCCAACTGTGCGGCATGGGAATTCTTCCTGAACACTGTAT | |
| | TATAGACATCACGTCAGAAGGCCAGGTTATGCTGACTCCTCAGAAGAACACCAGAACATTTGTAAATGGG | |
| | TCATCTGTCTCCAGTCCAATACAGCTACACCATGGGGACAGGATATTATGGGGAAACAATCATTTCTTCA | |
| | GACTCAATTTGCCTAAAAAGAAAAAGAAAGCAGAACGAGAGGATGAGGACCAGGATCCCTCCATGAAGAA | |
| | CGAGAATAGTTCTGAGCAGCTGGATGTAGACGGAGACTCCTCCAGCGAGGTGTCCAGTGAAGTTAACTTT | |
| | AATTACGAATACGCACAGATGGAGGTCACCATGAAGGCCCTGGGCAGCAATGATCCGATGCAGTCCATAT | |
| | TAAACAGCTTAGAACAACAGCATGAAGAAGAAAAACGATCTGCACTGGAGCGCCAGAGGCTTATGTATGA | |
| | GCACGAATTGGAGCAGCTCCGGAGAAGGCTGTCTCCTGAGAAGCAGAACTGCCGGAGCATGGACAGGTTT | |
| | TCTTTCCACTCGCCCAGCGCTCAGCAACGCTTAAGACAGTGGGCTGAGGAGAGAGAAGCAACGTTGAATA | |
| | ACAGCCTGATGAGGCTGAGGGAACAAATTGTTAAGGCCAATCTATTGGTGAGAGAAGCTAATTACATTGC | |
| | TGAGGAGCTGGATAAAAGAACAGAATACAAAGTTACCCTACAGATTCCAGCCTCCAGCCTGGATGCCAAC | |
| | AGGAAGCGAGGCTCTCTTCTTAGTGAGCCTGCAATCCAGGTGAGAAGAAAAGGAAAAGGAAAGCAGATTT | |
| | GGTCTTTGGAAAAACTGGACAACAGGCTGTTGGATATGAGAGACCTTTATCAGGAGTGGAAAGAGTGTGA | |
| | AGAAGATAACCCAGTAATACGATCATACTTCAAACGTGCTGATCCATTCTATGATGAGCAGGAAAATCAC | |
| | AGTCTCATTGGGGTGGCCAATGTCTTCCTCGAGTCACTTTTCTATGATGTGAAGTTACAATACGCTGTTC | |
| | CCATCATCAACCAGAAAGGAGAGGTGGCAGGTCGGCTGCACGTGGAGGTGATGCGACTCAGTGGTGATGT | |
| | TGGGGAGAGGATCGCAGGAGGCGATGAGGTGGCAGAGGTCTCCTTTGAGAAGGAGACCCAGGAGAACAAA | |
| | CTGGTGTGCATGGTTAAAATCCTGCAAGCTACTGGGTTGCCACAGCATCTGTCCCACTTTGTGTTCTGCA | |
| | AATACAGCTTCTGGGATCAACAGGAGCCGGTGATTGTCGCTCCTGAAGTGGACACCTCCTCCTCTTCCGT | |
| | CAGCAAGGAGCCGCACTGCATGGTTGTCTTTGATCATTGCAATGAGTTTTCTGTTAACATCACCGAAGAC | |
| | TTTATCGAGCATCTTTCCGAAGGAGCATTGGCAATTGAAGTATATGGACATAAAATAAACGATCCCCGGA | |
| | AAAACCCCGCCCTGTGGGATTTGGGAATCATCCAAGCAAAGACACGTAGTCTTCGGGACAGATGGAGTGA | |
| | AGTGACCAGGAAATTGGAATTCTGGGTTCAAATCTTGGAACAGAATGAGAATGGTGAATACTGCCCTGTA | |
| | GAAGTGATTTCTGCAAAGGATGTCCCAACAGGAGGAATCTTCCAGCTCCGGCAGGGGCAGTCCCGGAGAG | |
| | TTCAAGTCGAAGTGAAGTCAGTGCAGGAATCTGGGACTTTACCACTGATGGAAGAATGTATACTGTCTGT | |
| | TGGCATTGGATGTGTCAAAGTTAGACCGCTCAGAGCCCCCAGAACACATGAGACCTTCCATGAGGAAGAG | |
| | GAAGACATGGACAGCTACCAGGATCGAGATTTAGAGAGACTTCGTAGAAAATGGCTAAATGCATTAACAA | |
| | AACGTCAGGAGTACTTGGATCAACAATTGCAAAAGCTTGTCAGTAAACGTGATAAAACAGAGGATGATGC | |
| | TGACCGTGAAGCGCAGCTTCTGGAGATGCGGTTGACCCTAACTGAGGAGAGGAACGCGGTGATGGTCCCC | |
| | TCTGCTGGCAGTGGTATTCCAGGGGCCCCAGCAGAATGGACCCCAGTACCTGGGATGGAGACACACATTC | |
| | CTGTTATATTCCTGGACTTAAATGCTGATGATTTCAGCTCTCAGGATAATCTTGATGACCCAGAAGCTGG | |
| | TGGATGGGATGCGACCTTGACTGGGGAAGAAGAAGAGGAGTTCTTTGAATTGCAGATTGTGAAGCAGCAT | |
| | GATGGGGAGGTGAAAGCAGAAGCCTCCTGGGACTCCGCGGTGCATGGCTGCCCTCAGCTCAGCAGGGGCA | |
| | CGCCCGTGGACGAGCGGTTGTTCCTGATCGTGCGCGTGACGGTCCAGCTCAGCCACCCTGCTGACATGCA | |
| | ACTGGTGTTACGCAAGAGAATCTGTGTCAATGTTCACGGCCGCCAGGGTTTTGCACAGAGTCTCCTAAAA | |
| | AAGATGTCTCATCGAAGTTCTATTCCTGGCTGTGGAGTGACTTTTGAAATTGTCTCCAATATTCCAGAGG | |
| | ATGCCCAGGGAGTGGAAGAACGGGAAGCATTAGCAAGAATGGCAGCCAATGTTGAAAACCCAGCTTCTGC | |
| | TGACTCGGAGGCTTATATTGAAAAGTACCTCAGGAGCGTGCTGGCTGTAGAAAACCTCCTGACTTTAGAT | |
| | CGTCTGCGCCAGGAAGTTGCAGTGAAGGAACAGTTAACAGGAAAAGGAAAGTTGAGCAGGAGGAGTATCA | |
| | GTTCTCCAAATGTGAACAGATTGTCTGGAAGCCGACAAGATCTCATTCCATCATACAGTCTAGGCAGCAA | |
| | CAAGGGCCGGTGGGAAAGTCAGCAGGATGTATCCCAAACCACAGTTTCCAGAGGAATAGCTCCTGCCCCC | |
| | GCCCTCTCTGTTTCTCCCCAAAATAACCATTCTCCAGATCCAGGACTCAGTAACCTTGCAGCATCCTACT | |
| | TGAATCCTGTCAAATCCTTCGTGCCGCAAATGCCAAAGCTCCTCAAGTCTCTCTTTCCCGTCCGCGATGA | |
| | GAAGAGGGGCAAGCGGCCGTCTCCCCTCGCACACCAGCCCGTGCCCCGCATCATGGTGCAGTCAGCCAGC | |
| | CCGGACATCAGGGTGACCAGGATGGAGGAGGCTCAGCCGGAGATGGGCCCTGACGTGCTGGTGCAGACGA | |
| | TGGGGGCCCCGGCCTTGAAGATCTGCGACAAACCTGCCAAAGTGCCTTCCCCACCGCCTGTCATAGCTGT | |
| | CACAGCGGTCACCCCGGCTCCGGAGGCACAGGACGGGCCCCCCAGCCCCCTGAGTGAAGCCTCTAGCGGG | |
| | TACTTCTCCCACAGCGTCTCCACCGCGACCCTGTCGGACGCCCTGGGCCCCGGCCTGGACGCTGCGGCCC | |
| | CGCCGGGGTCCATGCCCACCGCCCCTGAGGCCGAGCCCGAGGCGCCCATCAGCCACCCCCCACCGCCCAC | |
| | GGCCGTCCCCGCCGAGGAGCCCCCTGGCCCCCAGCAGCTCGTGAGCCCCGGTCGGGAGCGCCCCGACCTC | |
| | GAGGCCCCGGCGCCCGGCTCCCCGTTCCGCGTCCGGAGGGTGCGGGCCTCGGAGTTGCGCTCCTTCTCGC | |
| | GCATGCTGGCTGGGGACCCCGGCTGCTCCCCGGGGGCCGAGGGGAATGCGCCGGCCCCGGGCGCCGGGGG | |
| | ACAGGCCCTGGCCTCTGATTCCGAGGAAGCTGACGAGGTCCCGGAGTGGCTCCGAGAGGGCGAGTTCGTC | |
| | ACCGTGGGCGCCCACAAAACGGGCGTGGTGAGATACGTGGGGCCTGCCGACTTCCAAGAGGGCACGTGGG | |
| | TCGGCGTGGAGCTCGACCTGCCCTCAGGTAAGAATGACGGTTCCATCGGCGGGAAGCAGTACTTCAGGTG | |
| | TAACCCTGGCTACGGGCTGCTGGTCAGGCCCAGCCGGGTCCGCAGGGCCACGGGCCCTGTGCGGCGGCGC | |
| | AGCACAGGACTCCGGCTGGGTGCCCCCGAGGCCCGCCGGAGCGCCACCCTCTCGGGCTCCGCCACCAACC | |
| | TGGCCTCGCTGACAGCTGCCCTGGCCAAGGCCGACAGGAGCCACAAGAACCCTGAGAACCGGAAATCCTG | |
| | GGCCAGCTGAGCCGCTGCCTTAGGGCGAACTTTTCTGGGGGTGCCCGGCCCCTTTTGAGCCCTGCCAGTG | |
| | ACAGCCCTGAGGAGCCAGGAGCCCGGTGGCCCCTTCCCCAGGGGCAGGGCGATGAATGCTTTTTGCACGA | |
| | CACAGGGCTGGTGACCTCCCTGGGCCTCTGGAAGCTTTGTTTCTTCTGTACCCGGGTAAAGTGGGGGCCT | |
| | CAACTGTGCCTCCTCAGGTGGATGGAAGGTTCTGGGTGCCCGCAGGGGCTGGGGGATGCTAGGACTGAGA | |
| | CCCTGGGTGGTGCAGCGCCTGGTGATCTTGCTGTGTGCCTGTGCCTGGGGCCTTATGTTGCTCTTTCTAT | |
| | CATTTCCATTCTGGTGGCCCCACTAATGTCTTAACCTAAACCATAATTGTAACCAGTGCCTTTCCTCCCC | |
| | ACTGGAGGGCAAGCCCCCCCACCCACCCAGGATGTCCTGGCTCACTCCGCAAGCCCCCCAGCCTCCCACC | |
| | CTGGTCCCAGTTTCCCGCAAAGTGCCTCTGGGGGACCCCCCAGCCTCCCACCCTGGTCCCAGGTTCCACA | |
| | AGTGCCTCTGGAGGGCCCTGGGCTCTGGCAGATGGTCCTGGTGCCCCAGACGGGGGCCGAGGGCCTGAGC | |
| | CCCCCCATCCCTCCTCTGCCAGGGTTTCTTAGCGGTTTCTCTGTGGATGTTTTGGCATCTTTAGACACCT | |
| | GGAAAGTCTCTTATGTTTGCCGTTTATTCCCTTCACAGAAGGCTTGGAATGTATTTATTTATATTTATTT | |
| | TTTCAAAATCCGAAATCATTTGCGAGCCGCAATCGTCGTCTGCCTGTGTGGGGGGGCCCAGGGCCTGCCT | |
| | TGCACGTTGCAGCCTCTCTGGCCATTGCAGAGCTGCTGGCCTCCTGCCCAGGTGGAGGGTCCTGGGGACG | |
| | GCAGAGGATAAAGCCCCCTCCTCACATCCCTCTATTGCGGATCCACAGTGGCCTTACTCTTAACTTGGAT | |
| | GAGAGCAAAAACCTGGGAGAATGATGTGCTTCTGTAGTCGGTGACAAAGGAAGAGGCATTGCTACTTTAT | |
| | TTGGTGCACTTTTGGTTTCTAGGAAGGTCTTTGGGTCATTTTAACTTCTCGGCAACTCCCAGACTCTCAG | |
| | AGTGTGGGGCTGGGGCCTGGCGGCTGGGCTGGTGCAGGGAGTGTGCTGGTTAGTCTCCAGACCCTCACAG | |
| | CAGCCACGCCCCCAGGCCCACCGTGCATGGTGTGGGCGGGACAGCCGGAAGCTTCCGGGGTGGCCTCCAC | |
| | CTCCTGGCTGGGGCACTTATGCTCCCAGAGCCTTTGGTGCCAGGTTTGTGGGATGGGGGTTAGCGTCTAT | |
| | GTGTGGAAGGCCACCAATCTAGGGACAGGAGTCCTGGGTCAAGATTCACACAGCCACCCTTGGAGCTGGT | |
| | TTCTAGTTCTCACATTTAGTCAACATCTAGAAAGCGCTGCGGAAGGCTCTGGTTCTCTAGGGACTTGAAG | |
| | GCGCCAACAGAGTAGTCTCCATGGTGGGCCTGTCCCAGCCCTGGCTGCGAGGACAGGTTGTCTTTCTCTC | |
| | CCCAGTTGGCGAGGGACACGAAGGCTGCGGCCGGGCTGGCAGAGGGCCCGGCCCCTGGGGGGAGGCACTC | |
| | CTCCAGGGCTCTCCCTGTCCTTAGCCGATTTTGAGGGAACCCTGTGGCACCTGTCCCTGGATGAAGAGCT | |
| | GTCACCTCTGCCTTGCCCTTTAACTCAACCCGCTTCCCAGCACAGCGGCTTTCTTTTTAAAACCTGTTTC | |
| | ACTGAGAAGTTTGTTTTTGGGTCCGCTGGTGTCACTATGGCCTGGGTGAGAGGCCAGCACTGCTGCTGCC | |
| | CTGAGGGGAAACGCCTGGGCCGTGTAGTGGGGACGCTCTGGGAATGGTGGCGGACGGGCAGCGTGGGTGG | |
| | GACCTGGCACTTCGTGGTGGCTGAGCCATCCACCCAGCAGCGGCCTCCTGTAGCACCATCTTGGGAAAGT | |
| | CCTGGGGGACGTGTGTGTCGTGCTTTTTACCATCGGTTTGACTTACAGTGGAGTAGAACGAGCCAGAGTT | |
| | CCTGACTTGAGCAGGTGGATTTGGGCCCAGGCCCTGTTCACTCTTGCTTCTCGGTGCGGACTAATGTCAG | |
| | CTTGTGGCTGGGAAAGAGGGATGTGCAGTGACGTGGTCACCAAGGCAGTGAGCCCCGCTGACCCCGGGCC | |
| | AGCACTTGGCAGGCAGGAGGTGCGGTCTCCAGAGTGGTGGGCCAGGGCGGGCTGGCCTCCGTCTTCTATC | |
| | TTCTTTTCTTGCCTCCCTGACCAGCAGACTCACCTCCCAAGAACGCCTGCCCGCCCACCCGCCTTAGGAC | |
| | TCCCGATGCGCTCCTGGAAGGCCCCAGGAGTGGCACCTTAGTGTGGGTCGGCCCGCAGATGGCACCCAAG | |
| | GCCGGGAAGGGCAGTAACTGCACACGCGGCGCTGTCAGAGATGGGGGTGGGGGATGCTTCTGGGGGCCCT | |
| | GCCTCCCCATTGTGTGCCCAGAACATCCCTGGCCCCACCCCGCCACTTCCCTCGGGCCCTTATGAAGGAC | |
| | TGAGGCTCCAGGGTGAGAAGGCTCACTTCTGCCCCGGGCACTGCGTCCAGCAGCAGAGGGGACAGGGGGC | |
| | AGGTGTGTGACTGGGTTCCTGGGTACCCAGGCCTGACCAGAGGGAGCGGGAGGGCAGAGGTGAGGAGGGG | |
| | GAAGATGTTTCTGGGCCTACCAAGGTTCAACAAGAGAACGGAGCTGGGAATGTGACTGCTGGAGCCTGAG | |
| | AGGTGGAGGAGTTCTGATCCCCCGTTACTTCCTAGCATTTTCTCCTCTTGCCTTAAAAGTTCCCTGTATG | |
| | TGAAACGGGAAGTCCTGAGAGTGTGTGTTGGTGGCTGTGCGCACGCACACAAGACGGGAGTCACCCTGTG | |
| | CTTCCTGCCCAAGATACTGACCCATTGAACCCCCAAAGCATCTTTCTCTCCACAAAGTCCGTGGTGCCTT | |
| | CCTGGTGGGCTGCAGACACTAATGGTGTTGGGGGGTCTTGGAACAGCTTCTCTATGTGTGGATTCGTGTA | |
| | AATGCGAAGAGTTCACATATAAAGAAGTGACTTTGATTCTGTGATTATATTGATTTGGTACACAGTAAAT | |
| | GGGAGTTTAAAAAATCCAAAGACTCTAATGACTTGTAAAGACTCTAATGATTTGTATCATGTAATGAACT | |
| | AAACCACCTGTAATTTTGTACCGTATGTGTCTTTCCATCAAATGACCAACAGCTTCTCAATAAAACCAGA | |
| | CCATTTCTCACCTGCAAAAAAAAA | |
| MUC1 | CGCTCCACCTCTCAAGCAGCCAGCGCCTGCCTGAATCTGTTCTGCCCCCTCCCCACCCATTTCACCACCA | 41 |
| NM_002456.5 | CCATGACACCGGGCACCCAGTCTCCTTTCTTCCTGCTGCTGCTCCTCACAGTGCTTACAGTTGTTACGGG | |
| | TTCTGGTCATGCAAGCTCTACCCCAGGTGGAGAAAAGGAGACTTCGGCTACCCAGAGAAGTTCAGTGCCC | |
| | AGCTCTACTGAGAAGAATGCTTTGTCTACTGGGGTCTCTTTCTTTTTCCTGTCTTTTCACATTTCAAACC | |
| | TCCAGTTTAATTCCTCTCTGGAAGATCCCAGCACCGACTACTACCAAGAGCTGCAGAGAGACATTTCTGA | |
| | AATGTTTTTGCAGATTTATAAACAAGGGGGTTTTCTGGGCCTCTCCAATATTAAGTTCAGGCCAGGATCT | |
| | GTGGTGGTACAATTGACTCTGGCCTTCCGAGAAGGTACCATCAATGTCCACGACGTGGAGACACAGTTCA | |
| | ATCAGTATAAAACGGAAGCAGCCTCTCGATATAACCTGACGATCTCAGACGTCAGCGTGAGTGATGTGCC | |
| | ATTTCCTTTCTCTGCCCAGTCTGGGGCTGGGGTGCCAGGCTGGGGCATCGCGCTGCTGGTGCTGGTCTGT | |
| | GTTCTGGTTGCGCTGGCCATTGTCTATCTCATTGCCTTGGCTGTCTGTCAGTGCCGCCGAAAGAACTACG | |
| | GGCAGCTGGACATCTTTCCAGCCCGGGATACCTACCATCCTATGAGCGAGTACCCCACCTACCACACCCA | |
| | TGGGCGCTATGTGCCCCCTAGCAGTACCGATCGTAGCCCCTATGAGAAGGTTTCTGCAGGTAATGGTGGC | |
| | AGCAGCCTCTCTTACACAAACCCAGCAGTGGCAGCCACTTCTGCCAACTTGTAGGGGCACGTCGCCCGCT | |
| | GAGCTGAGTGGCCAGCCAGTGCCATTCCACTCCACTCAGGTTCTTCAGGGCCAGAGCCCCTGCACCCTGT | |
| | TTGGGCTGGTGAGCTGGGAGTTCAGGTGGGCTGCTCACAGCCTCCTTCAGAGGCCCCACCAATTTCTCGG | |
| | ACACTTCTCAGTGTGTGGAAGCTCATGTGGGCCCCTGAGGGCTCATGCCTGGGAAGTGTTGTGGTGGGGG | |
| | CTCCCAGGAGGACTGGCCCAGAGAGCCCTGAGATAGCGGGGATCCTGAACTGGACTGAATAAAACGTGGT | |
| | CTCCCACTGCGCCAAAAAAAAAAAAAAAAA | |
| TK1 | GCGCACGTCCCGGATTCCTCCCACGAGGGGGCGGGCTGCGGCCAAATCTCCCGCCAGGTCAGCGGCCGGG | 42 |
| NM_003258.4 | CGCTGATTGGCCCCATGGCGGCGGGGCCGGCTCGTGATTGGCCAGCACGCCGTGGTTTAAAGCGGTCGGC | |
| | GCGGGAACCAGGGGCTTACTGCGGGACGGCCTTGGAGAGTACTCGGGTTCGTGAACTTCCCGGAGGCGCA | |
| | ATGAGCTGCATTAACCTGCCCACTGTGCTGCCTGGCTCCCCCAGCAAGACCCGGGGGCAGATCCAGGTGA | |
| | TTCTCGGGCCGATGTTCTCAGGAAAAAGCACAGAGTTGATGAGACGCGTCCGTCGCTTCCAGATTGCTCA | |
| | GTACAAGTGCCTGGTGATCAAGTATGCCAAAGACACTCGCTACAGCAGCAGCTTCTGCACACATGACCGG | |
| | AACACCATGGAGGCACTGCCCGCCTGCCTGCTCCGAGACGTGGCCCAGGAGGCCCTGGGCGTGGCTGTCA | |
| | TAGGCATCGACGAGGGGCAGTTTTTCCCTGACATCGTGGAGTTCTGCGAGGCCATGGCCAACGCCGGGAA | |
| | GACCGTAATTGTGGCTGCACTGGATGGGACCTTCCAGAGGAAGCCATTTGGGGCCATCCTGAACCTGGTG | |
| | CCGCTGGCCGAGAGCGTGGTGAAGCTGACGGCGGTGTGCATGGAGTGCTTCCGGGAAGCCGCCTATACCA | |
| | AGAGGCTCGGCACAGAGAAGGAGGTCGAGGTGATTGGGGGAGCAGACAAGTACCACTCCGTGTGTCGGCT | |
| | CTGCTACTTCAAGAAGGCCTCAGGCCAGCCTGCCGGGCCGGACAACAAAGAGAACTGCCCAGTGCCAGGA | |
| | AAGCCAGGGGAAGCCGTGGCTGCCAGGAAGCTCTTTGCCCCACAGCAGATTCTGCAATGCAGCCCTGCCA | |
| | ACTGAGGGACCTGCGAGGGCCGCCCGCTCCCTTCCTGCCACTGCCGCCTACTGGACGCTGCCCTGCATGC | |
| | TGCCCAGCCACTCCAGGAGGAAGTCGGGAGGCGTGGAGGGTGACCACACCTTGGCCTTCTGGGAACTCTC | |
| | CTTTGTGTGGCTGCCCCACCTGCCGCATGCTCCCTCCTCTCCTACCCACTGGTCTGCTTAAAGCTTCCCT | |
| | CTCAGCTGCTGGGACGATCGCCCAGGCTGGAGCTGGCCCCGCTTGGTGGCCTGGGATCTGGCACACTCCC | |
| | TCTCCTTGGGGTGAGGGACAGAGCCCCACGCTGTTGACATCAGCCTGCTTCTTCCCCTCTGCGGCTTTCA | |
| | CTGCTGAGTTTCTGTTCTCCCTGGGAAGCCTGTGCCAGCACCTTTGAGCCTTGGCCCACACTGAGGCTTA | |
| | GGCCTCTCTGCCTGGGATGGGCTCCCACCCTCCCCTGAGGATGGCCTGGATTCACGCCCTCTTGTTTCCT | |
| | TTTGGGCTCAAAGCCCTTCCTACCTCTGGTGATGGTTTCCACAGGAACAACAGCATCTTTCACCAAGATG | |
| | GGTGGCACCAACCTTGCTGGGACTTGGATCCCAGGGGCTTATCTCTTCAAGTGTGGAGAGGGCAGGGTCC | |
| | ACGCCTCTGCTGTAGCTTATGAAATTAACTAATTGAAAATTCACTGGTTGGTGGAAAAAAAAAAAAAAAA | |
| | AAAAAA | |
| CLDN7 | AAGTTGCAGCGCTCCGGGTGCCTGCGGGGGCGCGTCCCCGACGTCCTGCATATATATACTCAGGTGCGCC | 43 |
| NM_016887.6 | GCACCTGCTCGCCCGCACCTGCCGCCGCACCGCCAGCTCCCTGTGCCGCGCACCGCAGCCTGGGGCCCAA | |
| | GGGCCCGCATACTTTCTGGGGGCCACGCCCTAACGGCCCCTCCACTTCTTTGGGTAGTCTCGGAGCACGC | |
| | CGGTAGGAACCGCCCGGCCTTCGGGGACCGCTTTTGTCTGGAACCAGTCCTTCGGGCGAAGCCGGTTCCC | |
| | TCTGCTGTGAGAGTGTCGCTTCACCGGAGGGGACGATTTGTGTTTACCTCGGTTAACAAGATTTGTAGTT | |
| | ACCCGGTCCAAAAAAAAATCTTTTTCTCCTTTGGGTGACTTAAATCTCTATCCAAATTTTCTTGTGTTGC | |
| | TGCTCCCCGGATTTTTGTTTTTTTGTTTTTTTGCTTTACTGTAGGGTCGCCCTCCCGGCGCGTCCCGTCT | |
| | TTTCTGAGACAAGGAAATGGCCAACTCGGGCCTGCAACTGCTGGGCTTTTCAATGGCCATGCTTGGCTGG | |
| | GTGGGCCTGATAGCGAGCACTGCCATCCCTCAGTGGCAGATGAGCTCCTATGCGGGCGACAACATCATCA | |
| | CAGCCCAGGCCATGTACAAGGGGCTCTGGATGGAGTGCGTCACGCAGAGCACCGGCATGATGAGCTGCAA | |
| | AATGTACGACTCGGTGCTCGCCCTGCCGGGAGCCCTGCAGGCCACTCGAGCCTTAATGGTGGTGTCCCTG | |
| | GTGTTGGGCTTCTTAGCCATGTTTGTCGCCACGATGGGCATGAAGTGCACACGCTGTGGGGGAGATGACA | |
| | AAGCGAAGAAGGCCCGAATAGCTATGACTGGAGGCATTGTTTTCATTGTGGCAGGTCTTGCTGCCTTGGT | |
| | AGCATGTTCCTGGATTGGTCATCAGATTGTCACAGACTTTTATAACCCCTTGACGCCCATGAACGTTAAG | |
| | TACGAGTTTGGACCTGCCATCTTTATCGGCTGGGCAGGGTCTGCTCTGGTCCTTCTGGGAGGTGCCCTGC | |
| | TCTCTTGCTCCTGTCCAGGCAGTGAAAGCAAAGCTGCGTACCGAGCACCCCGCTCTTACCCCAAGTCCAA | |
| | TTCCTCCAAGGAATACGTGTGAGCTGGGGAGCCCAGCCTGCGGGCAGGGTGGGAGGCAAAGGCCTCCTGG | |
| | CCACTCCACCTCCAAACATCATGTATAGTTTGCTTGGGGGGAGGGCAGTTGGGGGGTTACTGGGAGAGGA | |
| | AGACATGGGGTGTGCTTTTGTACAGAAATAAAATTAAGTTTTGGAAATTAG | |
| FGFR4 | CTCGCTCCCGGCCGAGGAGCGCTCGGGCTGTCTGCGGACCCTGCCGCGTGCAGGGGTCGCGGCCGGCTGG | 44 |
| NM_002011.3 | AGCTGGGAGTGAGGCGGCGGAGGAGCCAGGTGAGGAGGAGCCAGGAAGGCAGTTGGTGGGAAGTCCAGCT | |
| | TGGGTCCCTGAGAGCTGTGAGAAGGAGATGCGGCTGCTGCTGGCCCTGTTGGGGGTCCTGCTGAGTGTGC | |
| | CTGGGCCTCCAGTCTTGTCCCTGGAGGCCTCTGAGGAAGTGGAGCTTGAGCCCTGCCTGGCTCCCAGCCT | |
| | GGAGCAGCAAGAGCAGGAGCTGACAGTAGCCCTTGGGCAGCCTGTGCGTCTGTGCTGTGGGCGGGCTGAG | |
| | CGTGGTGGCCACTGGTACAAGGAGGGCAGTCGCCTGGCACCTGCTGGCCGTGTACGGGGCTGGAGGGGCC | |
| | GCCTAGAGATTGCCAGCTTCCTACCTGAGGATGCTGGCCGCTACCTCTGCCTGGCACGAGGCTCCATGAT | |
| | CGTCCTGCAGAATCTCACCTTGATTACAGGTGACTCCTTGACCTCCAGCAACGATGATGAGGACCCCAAG | |
| | TCCCATAGGGACCCCTCGAATAGGCACAGTTACCCCCAGCAAGCACCCTACTGGACACACCCCCAGCGCA | |
| | TGGAGAAGAAACTGCATGCAGTACCTGCGGGGAACACCGTCAAGTTCCGCTGTCCAGCTGCAGGCAACCC | |
| | CACGCCCACCATCCGCTGGCTTAAGGATGGACAGGCCTTTCATGGGGAGAACCGCATTGGAGGCATTCGG | |
| | CTGCGCCATCAGCACTGGAGTCTCGTGATGGAGAGCGTGGTGCCCTCGGACCGCGGCACATACACCTGCC | |
| | TGGTAGAGAACGCTGTGGGCAGCATCCGCTATAACTACCTGCTAGATGTGCTGGAGCGGTCCCCGCACCG | |
| | GCCCATCCTGCAGGCCGGGCTCCCGGCCAACACCACAGCCGTGGTGGGCAGCGACGTGGAGCTGCTGTGC | |
| | AAGGTGTACAGCGATGCCCAGCCCCACATCCAGTGGCTGAAGCACATCGTCATCAACGGCAGCAGCTTCG | |
| | GAGCCGACGGTTTCCCCTATGTGCAAGTCCTAAAGACTGCAGACATCAATAGCTCAGAGGTGGAGGTCCT | |
| | GTACCTGCGGAACGTGTCAGCCGAGGACGCAGGCGAGTACACCTGCCTCGCAGGCAATTCCATCGGCCTC | |
| | TCCTACCAGTCTGCCTGGCTCACGGTGCTGCCAGAGGAGGACCCCACATGGACCGCAGCAGCGCCCGAGG | |
| | CCAGGTATACGGACATCATCCTGTACGCGTCGGGCTCCCTGGCCTTGGCTGTGCTCCTGCTGCTGGCCGG | |
| | GCTGTATCGAGGGCAGGCGCTCCACGGCCGGCACCCCCGCCCGCCCGCCACTGTGCAGAAGCTCTCCCGC | |
| | TTCCCTCTGGCCCGACAGTTCTCCCTGGAGTCAGGCTCTTCCGGCAAGTCAAGCTCATCCCTGGTACGAG | |
| | GCGTGCGTCTCTCCTCCAGCGGCCCCGCCTTGCTCGCCGGCCTCGTGAGTCTAGATCTACCTCTCGACCC | |
| | ACTATGGGAGTTCCCCCGGGACAGGCTGGTGCTTGGGAAGCCCCTAGGCGAGGGCTGCTTTGGCCAGGTA | |
| | GTACGTGCAGAGGCCTTTGGCATGGACCCTGCCCGGCCTGACCAAGCCAGCACTGTGGCCGTCAAGATGC | |
| | TCAAAGACAACGCCTCTGACAAGGACCTGGCCGACCTGGTCTCGGAGATGGAGGTGATGAAGCTGATCGG | |
| | CCGACACAAGAACATCATCAACCTGCTTGGTGTCTGCACCCAGGAAGGGCCCCTGTACGTGATCGTGGAG | |
| | TGCGCCGCCAAGGGAAACCTGCGGGAGTTCCTGCGGGCCCGGCGCCCCCCAGGCCCCGACCTCAGCCCCG | |
| | ACGGTCCTCGGAGCAGTGAGGGGCCGCTCTCCTTCCCAGTCCTGGTCTCCTGCGCCTACCAGGTGGCCCG | |
| | AGGCATGCAGTATCTGGAGTCCCGGAAGTGTATCCACCGGGACCTGGCTGCCCGCAATGTGCTGGTGACT | |
| | GAGGACAATGTGATGAAGATTGCTGACTTTGGGCTGGCCCGCGGCGTCCACCACATTGACTACTATAAGA | |
| | AAACCAGCAACGGCCGCCTGCCTGTGAAGTGGATGGCGCCCGAGGCCTTGTTTGACCGGGTGTACACACA | |
| | CCAGAGTGACGTGTGGTCTTTTGGGATCCTGCTATGGGAGATCTTCACCCTCGGGGGCTCCCCGTATCCT | |
| | GGCATCCCGGTGGAGGAGCTGTTCTCGCTGCTGCGGGAGGGACATCGGATGGACCGACCCCCACACTGCC | |
| | CCCCAGAGCTGTACGGGCTGATGCGTGAGTGCTGGCACGCAGCGCCCTCCCAGAGGCCTACCTTCAAGCA | |
| | GCTGGTGGAGGCGCTGGACAAGGTCCTGCTGGCCGTCTCTGAGGAGTACCTCGACCTCCGCCTGACCTTC | |
| | GGACCCTATTCCCCCTCTGGTGGGGACGCCAGCAGCACCTGCTCCTCCAGCGATTCTGTCTTCAGCCACG | |
| | ACCCCCTGCCATTGGGATCCAGCTCCTTCCCCTTCGGGTCTGGGGTGCAGACATGAGCAAGGCTCAAGGC | |
| | TGTGCAGGCACATAGGCTGGTGGCCTTGGGCCTTGGGGCTCAGCCACAGCCTGACACAGTGCTCGACCTT | |
| | GATAGCATGGGGCCCCTGGCCCAGAGTTGCTGTGCCGTGTCCAAGGGCCGTGCCCTTGCCCTTGGAGCTG | |
| | CCGTGCCTGTGTCCTGATGGCCCAAATGTCAGGGTTCTGCTCGGCTTCTTGGACCTTGGCGCTTAGTCCC | |
| | CATCCCGGGTTTGGCTGAGCCTGGCTGGAGAGCTGCTATGCTAAACCTCCTGCCTCCCAATACCAGCAGG | |
| | AGGTTCTGGGCCTCTGAACCCCCTTTCCCCACACCTCCCCCTGCTGCTGCTGCCCCAGCGTCTTGACGGG | |
| | AGCATTGGCCCCTGAGCCCAGAGAAGCTGGAAGCCTGCCGAAAACAGGAGCAAATGGCGTTTTATAAATT | |
| | ATTTTTTTGAAATAAAAAAAAAAAAAAAAA | |
| PDSS1 | GCCAGAGGCGGAGCCGCCGCCCTGCCGCGACTTTCAGACTCCGACCATGGCCTCGCGCTGGTGGCGGTGG | 45 |
| NM_014317.3 | CGGCGCGGCTGCTCCTGGAAGCCGGCGGCGCGGAGCCCCGGGCCCGGCTCCCCCGGCCGTGCGGGACCGT | |
| | TGGGGCCGAGCGCCGCTGCCGAAGTCCGCGCGCAGGTTCATAGGCGGAAGGGACTTGACTTGTCTCAGAT | |
| | ACCCTATATTAATCTTGTGAAGCATTTAACATCTGCCTGTCCAAATGTATGTCGTATATCACGGTTTCAT | |
| | CACACAACCCCAGACAGTAAAACACACAGTGGTGAAAAATACACCGATCCTTTCAAACTCGGTTGGAGAG | |
| | ACTTGAAAGGTCTGTATGAGGACATTAGAAAGGAACTGCTTATATCAACATCAGAACTTAAGGAAATGTC | |
| | TGAGTACTACTTTGATGGGAAAGGGAAAGCCTTTCGACCAATTATTGTGGCGCTAATGGCCCGAGCATGC | |
| | AATATTCATCATAACAACTCCCGACATGTGCAAGCCAGCCAGCGCGCCATAGCCTTAATTGCAGAAATGA | |
| | TCCACACTGCTAGTCTGGTTCACGATGACGTTATTGACGATGCAAGTTCTCGAAGAGGAAAACACACAGT | |
| | TAATAAGATCTGGGGTGAAAAGAAGGCTGTTCTTGCTGGAGATTTAATTCTTTCTGCAGCATCTATAGCT | |
| | CTGGCACGAATTGGAAATACAACTGTTATATCTATTTTAACCCAAGTTATTGAAGATTTGGTGCGTGGTG | |
| | AATTTCTTCAGCTCGGGTCAAAAGAAAATGAGAATGAAAGATTTGCACACTACCTTGAGAAGACATTCAA | |
| | GAAGACCGCCAGCCTGATAGCCAACAGTTGTAAAGCAGTCTCTGTTCTAGGATGTCCCGACCCAGTGGTG | |
| | CATGAGATCGCCTATCAGTACGGAAAAAATGTAGGAATAGCTTTTCAGCTAATAGATGATGTATTGGACT | |
| | TCACCTCGTGTTCTGACCAGATGGGCAAACCAACATCAGCTGATCTGAAGCTCGGGTTAGCCACTGGTCC | |
| | TGTCCTGTTTGCCTGTCAGCAGTTCCCAGAAATGAATGCTATGATCATGCGACGGTTCAGTTTGCCTGGA | |
| | GATGTAGACAGAGCTCGACAGTATGTACTACAGAGTGATGGTGTGCAACAAACAACCTACCTCGCCCAGC | |
| | AGTACTGCCATGAAGCAATAAGAGAGATCAGTAAACTTCGACCATCCCCAGAAAGAGATGCCCTCATTCA | |
| | GCTTTCAGAAATTGTACTCACAAGAGATAAATGACAACTCTTTCTGTTCTTTCTGGCAGCTATCTTACCA | |
| | GACTGTGCCTAAAGAATTTTGTGGAATACACTTTGTTTGCTTCATGTGCAGATAACCAAAAATCATTTTA | |
| | AAAGATATCAAACTTATTGATGGGCAATTTATTTTTTTTTATTGCAAAAGTTTTTTCAGAAAACTTTTTA | |
| | AATGTAATTAATAAACCACCTGAATCTGTCATTCTAGTCCTATAAATTATAATCAAGGTATCTTGATGGT | |
| | TATATGTGGTATTGTTTACACTGTTAATATCCACATGTAAGGCCATTACACAAATAAATAACCAATGTTA | |
| | AAATTCAAAAAAAAAAAAAAAAAAAAAAAAAAAAAAAAAAAAAAAAAAAAAAAAAAAAAAAAAAAAAAA | |
| AKT3 | GAATTCCCCAAACCCTAAAGCTGATATCACAAAGTACCATTTCTCCAAGTTGGGGGCTCAGAGGGGAGTC | 46 |
| AY005799.1 | ATCATGAGCGATGTTACCATTGTGAAAGAAGGTTGGGTTCAGAAGAGGGGAGAATATATAAAAAACTGGA | |
| | GGCCAAGATACTTCCTTTTGAAGACAGATGGCTCATTCATAGGATATAAAGAGAAACCTCAAGATGTGGA | |
| | TTTACCTTATCCCCTCAACAACTTTTCAGTGGCAAAATGCCAGTTAATGAAAACAGAACGACCAAAGCCA | |
| | AACACATTTATAATCAGATGTCTCCAGTGGACTACTGTTATAGAGAGAACATTTCATGTAGATACTCCAG | |
| | AGGAAAGGGAAGAATGGACAGAAGCTATCCAGGCTGTAGCAGACAGACTGCAGAGGCAAGAAGAGGAGAG | |
| | AATGAATTGTAGTCCAACTTCACAAATTGATAATATAGGAGAGGAAGAGATGGATGCCTCTACAACCCAT | |
| | CATAAAAGAAAGACAATGAATGATTTTGACTATTTGAAACTACTAGGTAAAGGCACTTTTGGGAAAGTTA | |
| | TTTTGGTTCGAGAGAAGGCAAGTGGAAAATACTATGCTATGAAGATTCTGAAGAAAGAAGTCATTATTGC | |
| | AAAGGATGAAGTGGCACACACTCTAACTGAAAGCAGAGTATTAAAGAACACTAGACATCCCTTTTTAACA | |
| | TCCTTGAAATATTCCTTCCAGACAAAAGACCGTTTGTGTTTTGTGATGGAATATGTTAATGGGGGCGAGC | |
| | TGTTTTTCCATTTGTCGAGAGAGCGGGTGTTCTCTGAGGACCGCACACGTTTCTATGGTGCAGAAATTGT | |
| | CTCTGCCTTGGACTATCTACATTCCGGAAAGATTGTGTACCGTGATCTCAAGTTGGAGAATCTAATGCTG | |
| | GACAAAGATGGCCACATAAAAATTACAGATTTTGGACTTTGCAAAGAAGGGATCACAGATGCAGCCACCA | |
| | TGAAGACATTCTGTGGCACTCCAGAATATCTGGCACCAGAGGTGTTAGAAGATAATGACTATGGCCGAGC | |
| | AGTAGACTGGTGGGGCCTAGGGGTTGTCATGTATGAAATGATGTGTGGGAGGTTACCTTTCTACAACCAG | |
| | GACCATGAGAAACTTTTTGAATTAATATTAATGGAAGACATTAAATTTCCTCGAACACTCTCTTCAGATG | |
| | CAAAATCATTGCTTTCAGGGCTCTTGATAAAGGATCCAAATAAACGCCTTGGTGGAGGACCAGATGATGC | |
| | AAAAGAAATTATGAGACACAGTTTCTTCTCTGGAGTAAACTGGCAAGATGTATATGATAAAAAGCTTGTA | |
| | CCTCCTTTTAAACCTCAAGTAACATCTGAGACAGATACTAGATATTTTGATGAAGAATTTACAGCTCAGA | |
| | CTATTACAATAACACCACCTGAAAAATGTCAGCAATCAGATTGTGGCATGCTGGGTAACTGGAAAAAATA | |
| | ATAAAAATCGGCTTCCTACAGCCAGCAGCACAGTCACCCATGGAACTGTTGGCTTTGGATTAAATGTGGA | |
| | ATTGAACGACTACCCAGAAGTGTTCTGGAAAGAAGCGAGATGTGTGGCCTGCCTCACCGTCCTCACCCAT | |
| | CAAAAGCACCAGCAGGCACGTTAACTCGAATTCTCACAAGGAAAAGGCCATTAAAGCTCAAGGTGCATTT | |
| | CAAACTCCAGGCTAC | |
| AVEN | GGGCGTCTCCGCCGCAGCTCGGCTCCCGCGCGCTCAGCACCGCCAGCGGCGGCCAGATGCAGGCGGAGCG | 47 |
| NM_020371.2 | AGGAGCTCGGGGAGGCCGTGGGCGGCGGCCAGGCCGCGGCCGGCCTGGCGGAGATCGCCACAGCGAGCGG | |
| | CCCGGAGCCGCAGCGGCGGTAGCCAGAGGCGGCGGCGGAGGCGGCGGCGGGGACGGAGGCGGACGCCGGG | |
| | GCCGTGGCCGTGGCCGGGGCTTCCGCGGCGCTCGCGGAGGCCGAGGAGGAGGAGGCGCCCCGCGAGGCAG | |
| | CCGCCGGGAGCCGGGAGGCTGGGGCGCAGGGGCCAGCGCGCCGGTTGAAGATGACAGCGATGCAGAGACC | |
| | TATGGAGAAGAGAATGATGAACAGGGAAATTATTCTAAAAGAAAGATTGTCTCTAACTGGGATCGATATC | |
| | AAGATATTGAAAAAGAGGTCAATAATGAAAGTGGAGAGTCACAGAGGGGAACAGATTTCAGTGTCCTCCT | |
| | TAGCTCTGCAGGGGACTCATTCTCACAGTTCCGGTTTGCTGAGGAGAAAGAATGGGATAGTGAAGCTTCT | |
| | TGTCCAAAACAGAATTCAGCATTTTATGTGGATAGTGAGTTATTGGTTCGAGCCCTTCAAGAGCTGCCTC | |
| | TCTGCCTCCGACTCAACGTTGCTGCCGAACTGGTCCAGGGTACAGTTCCTTTAGAGGTTCCTCAGGTGAA | |
| | ACCAAAGAGAACTGATGATGGCAAGGGATTAGGGATGCAGTTAAAGGGGCCCTTGGGGCCTGGAGGAAGG | |
| | GGGCCCATCTTTGAGCTGAAATCTGTGGCTGCTGGCTGCCCTGTGTTGCTGGGCAAAGACAACCCAAGCC | |
| | CGGGTCCTTCAAGGGATTCTCAGAAACCCACTTCCCCACTGCAGTCAGCAGGAGACCATTTGGAAGAAGA | |
| | ACTAGATCTGTTGCTTAATTTAGATGCACCTATAAAAGAGGGAGATAACATCTTACCAGATCAGACGTCT | |
| | CAGGACCTGAAATCCAAGGAAGATGGGGAGGTGGTCCAAGAGGAAGAAGTTTGTGCAAAACCATCTGTGA | |
| | CTGAAGAAAAAAACATGGAACCTGAGCAACCAAGTACCTCCAAAAATGTTACCGAGGAAGAGCTGGAAGA | |
| | CTGGTTGGACAGCATGATTTCCTAAAAAGGGGAAAAAAAGTGCCTGAAGCAAATCTTGGTTGCCTTCTAA | |
| | CGGCAGGTGGGCATAAGGCTGTCCTTCAGGACCAGCCAGTTTACAAGCATGTCTCAAGCTAGTGTGTTCC | |
| | ATTATGCTCACAGCAGTAAATGCCTACCTCTGTGTTTGACATCTGAAAGAATACATTGAAGCAGCTTGTT | |
| | GCATTTGTTTTTCTGGCTTAGTAATCTAATAGATTTCCTTAAGGGCAGGAGATAGACTCTGGCCCTTGTT | |
| | TCTAGCCTCCTTCCTTGCAGTGTTTACAACATAGCCAGTGTTTACAGCATAGCAGATGCTGCTGCTGATT | |
| | AAGAGAATAGATGCAAACAAGGCATGCATTTGGCCAAAATAAACAAATGCTGGTCTGTCCAAAAAAAAAA | |
| | AAAAAAAAAAA | |
| BCL2A1 | AGCCTACGCACGAAAGTGACTAGGAGGAAGGATATTATAAAGTGATGCAAACAGAAATTCCACCAGCCTC | 48 |
| NM_004049.3 | CATGTATCATCATGTGTCATAACTCAGTCAAGCTCAGTGAGCATTCTCAGCACATTGCCTCAACAGCTTC | |
| | AAGGTGAGCCAGCTCAAGACTTTGCTCTCCACCAGGCAGAAGATGACAGACTGTGAATTTGGATATATTT | |
| | ACAGGCTGGCTCAGGACTATCTGCAGTGCGTCCTACAGATACCACAACCTGGATCAGGTCCAAGCAAAAC | |
| | GTCCAGAGTGCTACAAAATGTTGCGTTCTCAGTCCAAAAAGAAGTGGAAAAGAATCTGAAGTCATGCTTG | |
| | GACAATGTTAATGTTGTGTCCGTAGACACTGCCAGAACACTATTCAACCAAGTGATGGAAAAGGAGTTTG | |
| | AAGACGGCATCATTAACTGGGGAAGAATTGTAACCATATTTGCATTTGAAGGTATTCTCATCAAGAAACT | |
| | TCTACGACAGCAAATTGCCCCGGATGTGGATACCTATAAGGAGATTTCATATTTTGTTGCGGAGTTCATA | |
| | ATGAATAACACAGGAGAATGGATAAGGCAAAACGGAGGCTGGGAAAATGGCTTTGTAAAGAAGTTTGAAC | |
| | CTAAATCTGGCTGGATGACTTTTCTAGAAGTTACAGGAAAGATCTGTGAAATGCTATCTCTCCTGAAGCA | |
| | ATACTGTTGACCAGAAAGGACACTCCATATTGTGAAACCGGCCTAATTTTTCTGACTGATATGGAAACGA | |
| | TTGCCAACACATACTTCTACTTTTAAATAAACAACTTTGATGATGTAACTTGACCTTCCAGAGTTATGGA | |
| | AATTTTGTCCCCATGTAATGAATAAATTGTATGTATTTTTCTCTATAAAAAAAAAAAAA | |
| CA9 | GCCCGTACACACCGTGTGCTGGGACACCCCACAGTCAGCCGCATGGCTCCCCTGTGCCCCAGCCCCTGGC | 49 |
| NM_001216.2 | TCCCTCTGTTGATCCCGGCCCCTGCTCCAGGCCTCACTGTGCAACTGCTGCTGTCACTGCTGCTTCTGGT | |
| | GCCTGTCCATCCCCAGAGGTTGCCCCGGATGCAGGAGGATTCCCCCTTGGGAGGAGGCTCTTCTGGGGAA | |
| | GATGACCCACTGGGCGAGGAGGATCTGCCCAGTGAAGAGGATTCACCCAGAGAGGAGGATCCACCCGGAG | |
| | AGGAGGATCTACCTGGAGAGGAGGATCTACCTGGAGAGGAGGATCTACCTGAAGTTAAGCCTAAATCAGA | |
| | AGAAGAGGGCTCCCTGAAGTTAGAGGATCTACCTACTGTTGAGGCTCCTGGAGATCCTCAAGAACCCCAG | |
| | AATAATGCCCACAGGGACAAAGAAGGGGATGACCAGAGTCATTGGCGCTATGGAGGCGACCCGCCCTGGC | |
| | CCCGGGTGTCCCCAGCCTGCGCGGGCCGCTTCCAGTCCCCGGTGGATATCCGCCCCCAGCTCGCCGCCTT | |
| | CTGCCCGGCCCTGCGCCCCCTGGAACTCCTGGGCTTCCAGCTCCCGCCGCTCCCAGAACTGCGCCTGCGC | |
| | AACAATGGCCACAGTGTGCAACTGACCCTGCCTCCTGGGCTAGAGATGGCTCTGGGTCCCGGGCGGGAGT | |
| | ACCGGGCTCTGCAGCTGCATCTGCACTGGGGGGCTGCAGGTCGTCCGGGCTCGGAGCACACTGTGGAAGG | |
| | CCACCGTTTCCCTGCCGAGATCCACGTGGTTCACCTCAGCACCGCCTTTGCCAGAGTTGACGAGGCCTTG | |
| | GGGCGCCCGGGAGGCCTGGCCGTGTTGGCCGCCTTTCTGGAGGAGGGCCCGGAAGAAAACAGTGCCTATG | |
| | AGCAGTTGCTGTCTCGCTTGGAAGAAATCGCTGAGGAAGGCTCAGAGACTCAGGTCCCAGGACTGGACAT | |
| | ATCTGCACTCCTGCCCTCTGACTTCAGCCGCTACTTCCAATATGAGGGGTCTCTGACTACACCGCCCTGT | |
| | GCCCAGGGTGTCATCTGGACTGTGTTTAACCAGACAGTGATGCTGAGTGCTAAGCAGCTCCACACCCTCT | |
| | CTGACACCCTGTGGGGACCTGGTGACTCTCGGCTACAGCTGAACTTCCGAGCGACGCAGCCTTTGAATGG | |
| | GCGAGTGATTGAGGCCTCCTTCCCTGCTGGAGTGGACAGCAGTCCTCGGGCTGCTGAGCCAGTCCAGCTG | |
| | AATTCCTGCCTGGCTGCTGGTGACATCCTAGCCCTGGTTTTTGGCCTCCTTTTTGCTGTCACCAGCGTCG | |
| | CGTTCCTTGTGCAGATGAGAAGGCAGCACAGAAGGGGAACCAAAGGGGGTGTGAGCTACCGCCCAGCAGA | |
| | GGTAGCCGAGACTGGAGCCTAGAGGCTGGATCTTGGAGAATGTGAGAAGCCAGCCAGAGGCATCTGAGGG | |
| | GGAGCCGGTAACTGTCCTGTCCTGCTCATTATGCCACTTCCTTTTAACTGCCAAGAAATTTTTTAAAATA | |
| | AATATTTATAATAAAAAAAAA | |
| CDKN1B | CTTCTTCGTCAGCCTCCCTTCCACCGCCATATTGGGCCACTAAAAAAAGGGGGCTCGTCTTTTCGGGGTG | 50 |
| NM_004064.3 | TTTTTCTCCCCCTCCCCTGTCCCCGCTTGCTCACGGCTCTGCGACTCCGACGCCGGCAAGGTTTGGAGAG | |
| | CGGCTGGGTTCGCGGGACCCGCGGGCTTGCACCCGCCCAGACTCGGACGGGCTTTGCCACCCTCTCCGCT | |
| | TGCCTGGTCCCCTCTCCTCTCCGCCCTCCCGCTCGCCAGTCCATTTGATCAGCGGAGACTCGGCGGCCGG | |
| | GCCGGGGCTTCCCCGCAGCCCCTGCGCGCTCCTAGAGCTCGGGCCGTGGCTCGTCGGGGTCTGTGTCTTT | |
| | TGGCTCCGAGGGCAGTCGCTGGGCTTCCGAGAGGGGTTCGGGCTGCGTAGGGGCGCTTTGTTTTGTTCGG | |
| | TTTTGTTTTTTTGAGAGTGCGAGAGAGGCGGTCGTGCAGACCCGGGAGAAAGATGTCAAACGTGCGAGTG | |
| | TCTAACGGGAGCCCTAGCCTGGAGCGGATGGACGCCAGGCAGGCGGAGCACCCCAAGCCCTCGGCCTGCA | |
| | GGAACCTCTTCGGCCCGGTGGACCACGAAGAGTTAACCCGGGACTTGGAGAAGCACTGCAGAGACATGGA | |
| | AGAGGCGAGCCAGCGCAAGTGGAATTTCGATTTTCAGAATCACAAACCCCTAGAGGGCAAGTACGAGTGG | |
| | CAAGAGGTGGAGAAGGGCAGCTTGCCCGAGTTCTACTACAGACCCCCGCGGCCCCCCAAAGGTGCCTGCA | |
| | AGGTGCCGGCGCAGGAGAGCCAGGATGTCAGCGGGAGCCGCCCGGCGGCGCCTTTAATTGGGGCTCCGGC | |
| | TAACTCTGAGGACACGCATTTGGTGGACCCAAAGACTGATCCGTCGGACAGCCAGACGGGGTTAGCGGAG | |
| | CAATGCGCAGGAATAAGGAAGCGACCTGCAACCGACGATTCTTCTACTCAAAACAAAAGAGCCAACAGAA | |
| | CAGAAGAAAATGTTTCAGACGGTTCCCCAAATGCCGGTTCTGTGGAGCAGACGCCCAAGAAGCCTGGCCT | |
| | CAGAAGACGTCAAACGTAAACAGCTCGAATTAAGAATATGTTTCCTTGTTTATCAGATACATCACTGCTT | |
| | GATGAAGCAAGGAAGATATACATGAAAATTTTAAAAATACATATCGCTGACTTCATGGAATGGACATCCT | |
| | GTATAAGCACTGAAAAACAACAACACAATAACACTAAAATTTTAGGCACTCTTAAATGATCTGCCTCTAA | |
| | AAGCGTTGGATGTAGCATTATGCAATTAGGTTTTTCCTTATTTGCTTCATTGTACTACCTGTGTATATAG | |
| | TTTTTACCTTTTATGTAGCACATAAACTTTGGGGAAGGGAGGGCAGGGTGGGGCTGAGGAACTGACGTGG | |
| | AGCGGGGTATGAAGAGCTTGCTTTGATTTACAGCAAGTAGATAAATATTTGACTTGCATGAAGAGAAGCA | |
| | ATTTTGGGGAAGGGTTTGAATTGTTTTCTTTAAAGATGTAATGTCCCTTTCAGAGACAGCTGATACTTCA | |
| | TTTAAAAAAATCACAAAAATTTGAACACTGGCTAAAGATAATTGCTATTTATTTTTACAAGAAGTTTATT | |
| | CTCATTTGGGAGATCTGGTGATCTCCCAAGCTATCTAAAGTTTGTTAGATAGCTGCATGTGGCTTTTTTA | |
| | AAAAAGCAACAGAAACCTATCCTCACTGCCCTCCCCAGTCTCTCTTAAAGTTGGAATTTACCAGTTAATT | |
| | ACTCAGCAGAATGGTGATCACTCCAGGTAGTTTGGGGCAAAAATCCGAGGTGCTTGGGAGTTTTGAATGT | |
| | TAAGAATTGACCATCTGCTTTTATTAAATTTGTTGACAAAATTTTCTCATTTTCTTTTCACTTCGGGCTG | |
| | TGTAAACACAGTCAAAATAATTCTAAATCCCTCGATATTTTTAAAGATCTGTAAGTAACTTCACATTAAA | |
| | AAATGAAATATTTTTTAATTTAAAGCTTACTCTGTCCATTTATCCACAGGAAAGTGTTATTTTTCAAGGA | |
| | AGGTTCATGTAGAGAAAAGCACACTTGTAGGATAAGTGAAATGGATACTACATCTTTAAACAGTATTTCA | |
| | TTGCCTGTGTATGGAAAAACCATTTGAAGTGTACCTGTGTACATAACTCTGTAAAAACACTGAAAAATTA | |
| | TACTAACTTATTTATGTTAAAAGATTTTTTTTAATCTAGACAATATACAAGCCAAAGTGGCATGTTTTGT | |
| | GCATTTGTAAATGCTGTGTTGGGTAGAATAGGTTTTCCCCTCTTTTGTTAAATAATATGGCTATGCTTAA | |
| | AAGGTTGCATACTGAGCCAAGTATAATTTTTTGTAATGTGTGAAAAAGATGCCAATTATTGTTACACATT | |
| | AAGTAATCAATAAAGAAAACTTCCATAGCTATT | |
| CFLAR | ATACTCAGTCACACAAGCCATAGCAGGAAACAGCGAGCTTGCAGCCTCACCGACGAGTCTCAACTAAAAG | 51 |
| NM_003879.5 | GGACTCCCGGAGCTAGGGGTGGGGACTCGGCCTCACACAGTGAGTGCCGGCTATTGGACTTTTGTCCAGT | |
| | GACAGCTGAGACAACAAGGACCACGGGAGGAGGTGTAGGAGAGAAGCGCCGCGAACAGCGATCGCCCAGC | |
| | ACCAAGTCCGCTTCCAGGCTTTCGGTTTCTTTGCCTCCATCTTGGGTGCGCCTTCCCGGCGTCTAGGGGA | |
| | GCGAAGGCTGAGGTGGCAGCGGCAGGAGAGTCCGGCCGCGACAGGACGAACTCCCCCACTGGAAAGGATT | |
| | CTGAAAGAAATGAAGTCAGCCCTCAGAAATGAAGTTGACTGCCTGCTGGCTTTCTGTTGACTGGCCCGGA | |
| | GCTGTACTGCAAGACCCTTGTGAGCTTCCCTAGTCTAAGAGTAGGATGTCTGCTGAAGTCATCCATCAGG | |
| | TTGAAGAAGCACTTGATACAGATGAGAAGGAGATGCTGCTCTTTTTGTGCCGGGATGTTGCTATAGATGT | |
| | GGTTCCACCTAATGTCAGGGACCTTCTGGATATTTTACGGGAAAGAGGTAAGCTGTCTGTCGGGGACTTG | |
| | GCTGAACTGCTCTACAGAGTGAGGCGATTTGACCTGCTCAAACGTATCTTGAAGATGGACAGAAAAGCTG | |
| | TGGAGACCCACCTGCTCAGGAACCCTCACCTTGTTTCGGACTATAGAGTGCTGATGGCAGAGATTGGTGA | |
| | GGATTTGGATAAATCTGATGTGTCCTCATTAATTTTCCTCATGAAGGATTACATGGGCCGAGGCAAGATA | |
| | AGCAAGGAGAAGAGTTTCTTGGACCTTGTGGTTGAGTTGGAGAAACTAAATCTGGTTGCCCCAGATCAAC | |
| | TGGATTTATTAGAAAAATGCCTAAAGAACATCCACAGAATAGACCTGAAGACAAAAATCCAGAAGTACAA | |
| | GCAGTCTGTTCAAGGAGCAGGGACAAGTTACAGGAATGTTCTCCAAGCAGCAATCCAAAAGAGTCTCAAG | |
| | GATCCTTCAAATAACTTCAGGCTCCATAATGGGAGAAGTAAAGAACAAAGACTTAAGGAACAGCTTGGCG | |
| | CTCAACAAGAACCAGTGAAGAAATCCATTCAGGAATCAGAAGCTTTTTTGCCTCAGAGCATACCTGAAGA | |
| | GAGATACAAGATGAAGAGCAAGCCCCTAGGAATCTGCCTGATAATCGATTGCATTGGCAATGAGACAGAG | |
| | CTTCTTCGAGACACCTTCACTTCCCTGGGCTATGAAGTCCAGAAATTCTTGCATCTCAGTATGCATGGTA | |
| | TATCCCAGATTCTTGGCCAATTTGCCTGTATGCCCGAGCACCGAGACTACGACAGCTTTGTGTGTGTCCT | |
| | GGTGAGCCGAGGAGGCTCCCAGAGTGTGTATGGTGTGGATCAGACTCACTCAGGGCTCCCCCTGCATCAC | |
| | ATCAGGAGGATGTTCATGGGAGATTCATGCCCTTATCTAGCAGGGAAGCCAAAGATGTTTTTTATTCAGA | |
| | ACTATGTGGTGTCAGAGGGCCAGCTGGAGGACAGCAGCCTCTTGGAGGTGGATGGGCCAGCGATGAAGAA | |
| | TGTGGAATTCAAGGCTCAGAAGCGAGGGCTGTGCACAGTTCACCGAGAAGCTGACTTCTTCTGGAGCCTG | |
| | TGTACTGCGGACATGTCCCTGCTGGAGCAGTCTCACAGCTCACCATCCCTGTACCTGCAGTGCCTCTCCC | |
| | AGAAACTGAGACAAGAAAGAAAACGCCCACTCCTGGATCTTCACATTGAACTCAATGGCTACATGTATGA | |
| | TTGGAACAGCAGAGTTTCTGCCAAGGAGAAATATTATGTCTGGCTGCAGCACACTCTGAGAAAGAAACTT | |
| | ATCCTCTCCTACACATAAGAAACCAAAAGGCTGGGCGTAGTGGCTCACACCTGTAATCCCAGCACTTTGG | |
| | GAGGCCAAGGAGGGCAGATCACTTCAGGTCAGGAGTTCGAGACCAGCCTGGCCAACATGGTAAACGCTGT | |
| | CCCTAGTAAAAATACAAAAATTAGCTGGGTGTGGGTGTGGGTACCTGTATTCCCAGTTACTTGGGAGGCT | |
| | GAGGTGGGAGGATCTTTTGAACCCAGGAGTTCAGGGTCATAGCATGCTGTGATTGTGCCTACGAATAGCC | |
| | ACTGCATACCAACCTGGGCAATATAGCAAGATCCCATCTCTTTAAAAAAAAAAAAAAAGGACAGGAACTA | |
| | TCTTACTCAATGTATTAGTCATGTTTCTCTAGAGGGACAGAACTAATAGGATACATGTATATAAAAAGGG | |
| | GAGTTTATTAAGGAGTATTGACTCACATGATCACAGGGTTAGGTCCCACAATAGGTCATCTGCAAGCAAG | |
| | GAAGCCAATTCAAGTCCCAAAGCTGAAGAACTTGGAGTCCAATGTTTGAGGGCAGGAAGCATTCAGCATG | |
| | AGAGAAAGATGGAGGCCAGAAGACTACACCAGTCTAGTCTTTCCATGTTTTGCCTGCTTTTATTCTGGCA | |
| | GTGCTGGCAGCTGATTAGATGGTGCCCACCCAGATTGAGGATGGTCTGCCTTTCCCAGTCCACTGACTCA | |
| | AATGTTAAATCTCCTTTGGCAGCACCCTCACAGATGTACCCGGGAACACTTTGCATCCTTCTATTCAATC | |
| | AAGTTGATACTCAGTATTAACCATCACAGTCCATTTGGGCAACTATACCAAATTACCATAGACCAGGTGA | |
| | CTTAAACAGCAGTTATTTCTCACAGTTCCGGAGGCTGGGAAATCCAACATCTAAGTGGTAGCATATCTGG | |
| | TGTCTGGTAAGGCATGCTTCCAGATCTTACCAGATGTCAGTCTTTTGATGTTCTCACATGGCAGAAAAAG | |
| | AGGATGCAAACTCTCAAGTATATCTTTAAGGGCACAAATTCCATTCATGAGGGCTCTACCCTCATCACCT | |
| | AATTACCTCCCAAAGGCCCCACCTTCTGATACTGTCACTTTGGGGATACTGTCTCCCCTTTGAATTCTGG | |
| | GGGGAATACAAACATTCAGTTTGTAACAATAGCCTTATGATTTAGAGGTTACTTGTTCATTCACCTAGAC | |
| | CTCAAATTGCATTTTACAGCTAGTCAAGTATATCTTTCTCTGATTTGATAGTGTGACCTAAAAGGGGACC | |
| | ATTGTTTGAAATATCATTAGAGTTGCTTATTATTATTATTATTATTATTATTATTATTATTATTATTATT | |
| | ATTGAGACAGAGTTTCATTCTGCTGCCCAGGCTGGAGTGCAGTGGCATCATCTTGGCTCATTGCAACCTC | |
| | TGCCTTCTGGGTTCAAGCGATTCTCCTGCCTCAGCCTCCCGAGTAGCTGGGATTACAGGCTCCTGCCACC | |
| | ACACCCGGCTAATTTTTGTATTTTTAGTGGAGACAGGGTTTCCACCATGTTGGCCAGCGTGGTCTTGAAC | |
| | TCCTGACCTCAGGTGATTCACCAGCCTCGGCCTCCCAAAGTGCTGGGATTACAGGTGTGAGCCACTGCAC | |
| | CTGGCCTATTATTATTTTTAAATTTTTTTTTTTTAATTGATCATTCTTGGGTGTTTCTCACAGAGGGTGA | |
| | TTTGGCAGGGTCACAGGACAATAGTGGAGGGAAGGTCAGCAGATAAACAAGTGAACAAAGGTCTCTGGTT | |
| | TTCCTAGGCAGAGGACCCTGCGGCCTTCCGCAGTGTTTGTGTCCCTGGGTACTTGAGATTAGGGAGTGGT | |
| | GATGACTCTTAAGGAGCATGCTGCCTTCAAGCATCTGTTTAACAAAGCACATCTTGCACTGCCCTTAATC | |
| | CATTTAACCCTGAGTGGACACAGCACATGTTTCAGAGAGCACAGGGTTGGGGGTAAGGTCATAGATCAAC | |
| | AGCATCCTAAGGCAGAAGAATTTTTCTTAGTACAGAACAAAATGAAGTCTCCCATGTCTACTTCTTTCTA | |
| | CACAGACACAGCAACAATCTGATTTCTCTATCTTTTCCCCACCTTTCCCCCTTTTCTATTCCACAAAACC | |
| | GCCATCGTCATCATGGCCTGTTCTCAATGAGCTGTTGGGTACACCTCCCAGACGGGGTGGCGGCTGGGCA | |
| | GAGGGGCTCCTCACTTCCCAGATGGGGCGGCCAGGCGGACGCGCCCCCCACCTCCCTCCCGGACGGGATA | |
| | GCTGGCCGGGCGGGGGCTGACCCCCCACCTCCCTCCCCGACGGGGCGGCTGGCCGGGCGGGGGCTGACCC | |
| | CCACGCCTCCCTCCCGGACGGGGCGGCTGCCAGGCGGAGGGGCTCCTCACTTCTCAGACGGGGTGGCTGC | |
| | TGGGCGGAGACGCTCCTCACTTCCCAGACAGGGTGGCTGTCGGGCGGAGGGGCTCCTCACTTCTCAGACG | |
| | GGGCAGCTGCGGGCGGAGGGGCTCCTCACTTCTCAGACGGGGTGGCCGGGCAGAGAAGCTCCTCACATCC | |
| | CAGACGGGGGGGCGGGGCAGAGGCGCTCCCCACATCTCAGACGATGGGCGGCCGGGCAGAGACGCTCCTC | |
| | ACTTCATCCCAGACGGGGTGGCGGCCGGGCAGAAGCTGTAATCTCGGCACCCTGGGGGGCCAAGGCAGGC | |
| | GGCTGGGAGGCGGAGGCCGTAGCCAGCTGAGATCACACCACTGCACTCCAGCCTGGGCAACATTGAGCAC | |
| | TGAGTGGACGAGACTCTGCCCGCAATCCCGGCACCTCGGGAGGCCGAGGCTGGCAGATCACTCGCAGTCA | |
| | GGAGCTGGAGACCAGCCCGGCCAACACAGTGAAACCCTGTCTCCACCAAAAAAATACGAAAACCAGTCAG | |
| | GCGTGGCGGCGCCCGCAATGGCAGGCACGCGGCAGGCCGAGGCGGGAGAATCAGGCAGGGAGGCTGCAGT | |
| | GAGCCGAGATGGCAGCAGTACAGTCCAGCTTCGGCTCGGCATCAGAGGGAGACCGTGGGGAGAGGGAGAA | |
| | GAGAGGGAGGGGGAGAGGGCTATTTTTAAAATTTTTTAAAATTGCTGAACAGGGGTACCTCTGGGCAGTG | |
| | TGTCAGAATACCACTTTTTAAATATTTTATGATTTATTTATTTTTCTATTTCTTGAGGTTTTAACTGATG | |
| | TGTATCTGTATGTCTATTTGTGTATATTTTGTCATGATCATGTAACAGAGTCTGAAAAGTGTCGAAGAGA | |
| | CAGTTTTCAGGAACAACAAGCAATTATTCCTACTTTCCAAGTTATTTTGATGCCATGGTGGCTCATACCT | |
| | ATAATCTGAGTACTTTGGGAGGCTGAGGTGGACTGATCACTTGAGCCCAGGAGTTTGAGACCAGCCTGGG | |
| | CAACATAGCAAGACTCCATCTCTACAAAAAAAGACAAAATTTAGCTGAGCGTGGTGGCGTGTTCCTGTAG | |
| | TCCCAGCTACTTGGGAGGCTGAAGTGAGTGGATCCCCTGAGCCCAGAGAGGTCAAGGTTGTGATGAGCTG | |
| | TGATCACACCACTGCACTTCAGCATGGGAGACAGAGTGAGACCCTGTTTCAGAAAAAATAAATAAATAAA | |
| | ACCACCAGCACCACAAACAACAACAAAAAGTTATTTTGTACTTGTTTTGAGCACAGGACTCCTGAGGGTA | |
| | TCTTTGCATTTAATATTACATAGGGGTGCCAGTGGGAAGTAATGTGTATGCTTGGCCTCATGAGCTAAAA | |
| | CCCTGTGTTAATTATGACAGAAGGAAAGTGTGTGAGAGAGATCTTAACTACCTAGCAGCTCTAGCTGCCA | |
| | TCTTGAACCATGAAGATACGGGCCACACGTAGGGGTAGCTGGGTAGTGAGCAGCAAGAAGCCTTGTTGGA | |
| | TGAGGGCACGAAGGAGCAGAATCACTGGAATCACTGTGTCAGCCCTAATTACCTACCTCTGGACTTTTAT | |
| | GTGAGGGGAAAAAAAATTGACAGTTTATATTTATCTCAACCTAGTTAACCCAAGTGATGCATTGTTATGA | |
| | GATTAAAATGTTTGGAGGCCGGGTGCGGTGGCTCACGCCTATAATCCCAGCCCTTTGGGAGGCCAAGGCG | |
| | GGCGGATCACGAGGTCAGGAGATCAAGACCATCCTGGCTAACATGTAAAACCCCGTCTCTACTAAAAATA | |
| | CAAAAAATTAGCCAGGCGTTGTGGCGGTCGCCTGTAGTCCCTGCTATTTGGGAGGCCGAGGCAAGAGAAC | |
| | GGCATGAACCTGGGAGGTGGAGCTTGCAGCGAGCTGAGATCTTGCCACTGCACTCCAGCCTGGGCGACAG | |
| | TGCGAGACTCTGTCTCAAAAATAAATAAATAAATAAATAATAAATAAAATGTTTGGAATGTTGGCTTCAT | |
| | CCCTGGGATGCAAGGCTGGTTCAACATACGCAAATCAAGAAACATAATTCATCACATAAACAGAACTAAA | |
| | GACAAAAACCACATGATTATCTCAATAGATACAGAAAAGGCCTTCAATAAAATTCAACGTTGCTTCATGT | |
| | TAAAAACTCTCAATAAACTAGGTATTGATGGAAAATATCTCAAAATAATAACCATTTATGACAAACCCAC | |
| | AGCCATTATCATACTGAATGGGCAAAAGCTGGAAGCATTCCCCTTGAAAACTGGCACAAGACAGGGATGC | |
| | CGTCTCACCACTCCTATTTAACATAGTATTGGAAGTTCTGGCCAAGAAAATCAGGCAAGAGAAACAAATA | |
| | AGGGGTATTCAAATAGGAAAAGAGGAAGTAAAACTGTGTTTGCAGATGACATGATACTATATCTAGAAAA | |
| | CCCCATTATCTCCACCCAAAAGTTCCTTAAGCTGATAAGCAACTTCAGCAAAGTCTCAGGATACAAAATC | |
| | AATGTGCAGAAATCACAAGCATTCTATACACCAACAATACACAAGCAGAGAGCCAAATCATGAATGAACT | |
| | CCCATTCACAGTTGCTAGAAAGAGAATAAAATACCTAGGAATACAGCTAATAAGATGTGAAGGATCTCTT | |
| | CAAGGAGAACTACAAACCACTGCTCAAGGAAATAAGAGAGGACACAAATGAAAAAACATTCCATTCTCGT | |
| | GGATAGGAAGAATCAATATCATGAAAATGGCCATACTACCCAAAGTAATTTATAGGTTCATTGCTATTCC | |
| | CATTAAACTACTATTGACATTCTTCACAGAATTAGAAAAAAACTACTTTAAAATTCAAATGGAACCAAAA | |
| | AAGAGCCCGTATAACCAAGACAACAATAAGCAAAAAGAACAAAGCTGGAAGCATCACACTACCCAACTTC | |
| | AAAGTATACTGCAAGGCTACAGTAGCCAAAATGGCATGGTACTGGTACAAAAACAGACACATAGACCAAT | |
| | GGAACAGAATAGAGACCAGAGAAAGAAGACCACACATCTACAGCCATCTGATCATCGACAAACCTGACAA | |
| | AAACAAGCAATGGGGAAAAGATTCCCTATTTAATAAATGGTGCTGGGAAAACTGGCTAGCCATATGCAGA | |
| | AAATTGAAACTGACCCCTTCCTTACACCTTATACAAAAATTAACTCAAGATTAAAGACTTAATGTAAAAC | |
| | CTAAAACTATAAAAACCCTAGAAGAAAATCTATTTAATACCATTCAAGACATAGGCACAAGCAAAGGTTT | |
| | CATGACAAAAACATCAAAAGCAATTGCAACAAAAGCAAAAATTACAAATGGGATCTAATTAAACTAAAGA | |
| | GCTCCTGCACAGCAAAAGAAACTATCATTAGAGTGAACAGGCAACCTACAGAATGGGAGAACATTTTTGC | |
| | AATCTATCCATCTGACAAAGGTCTAATATCCAGAACCTACAAGGAACTTAAAACAAATTTACAAGGAAAA | |
| | AAACAACCCCATCAAAAAGTGGACAAAGGACATGAACAGACACTTCTCAAAAGAAGACATTTATGTGGCC | |
| | AACAAACATATAAAAAAAAGCTCAACCTTACTGATCATTAGAGAAATGCAAAGGAGAACCACAATGAGAT | |
| | ACCATCTCATGCCGGTCAGAATGGTGATTATTAAAAAGTCAAAAAACAACAGATGCTGGCGAGGCTGTGG | |
| | AGAAGTAGGAACACTTTTACATTGTTGGTGGGAATGTAAATTAGTTCAACCGTTGTGGAAGTGTGTGTGG | |
| | CTATTCCTCAAAGATCTAGAACTAGAAATACTATTTGTCCCAGCAATCCCATTACTGGGTATATACCCAA | |
| | AGGAATATAAACCATTTTATTATAAAGATACATGCACATTTTTGTTCATTGCAGCACTCTTCACAATAGC | |
| | AAAGACACAATAGCAAATGCCCATCAAAGATAGACTGGATAAAGAAAATGTGGTACATATACACCATGGA | |
| | ATACTGTGCAGTGCAGCCATTACAGCTTTTGGTGATACAGTGAATCAGATTTTTCATTAATTCTTTTAAT | |
| | TGGTTATTACTGAACGTGAAAAAGTAATGTTTGTATTGAAATCTTGAGTCTGGCCATGTTTCTATTTTAA | |
| | ATTCATAAAGAATTCTAACAAGAGGAATTCCAAGAATGTCATAAATGGATGTTTCTCCATGGATGAAGGA | |
| | ACTGTTTTATTCACTTGCTGATAATTCAGCCTAATCCAGTTTGACATCATATAGATAAGTAGTTGAATTA | |
| | TGGATTTAAAATACATATCATTTTCTAACTCCAAAGGTAATACTTATTTAAATGGTTTTGAAAATATAGA | |
| | AAGGCACAATTTCTTTTTAAATCTGTTATTCTCCACCACCACTCAATCTGTCTATCATCTATCTCTCCAT | |
| | TCATTCTTCCATTTGTTTATATCTGTTAATCTTTGTATGTGTTCATGTATAGCTTTTACATGATTGGAAT | |
| | CATAATGCATATTCCATTTTGAAGTCTGCTTTTTTTTACACAAAAATATGTTGTGAATATTTTCCTATAT | |
| | TATGAAATATCATTAGCTGAGCTTTTAGAATTGACTGCATGTTTTGGTACCATTTAGATATAGTTTAAGA | |
| | TACTTAGAAGTTATGTGGCTTTGCCACTATGGATGAATCTTATTTACTCAATATTAATTACTTACAAATA | |
| | ACCTCACCTAAACACTACTCAGCCATAAAAAGGAATGAATTAATGACATTCACAGCAACCTGGAGACTAT | |
| | TACTCTAAAGGAAGTAACTGAGGAATGGAAAACCAAACATTGTATGTTCTCACTCATAAGTGGGAGATAA | |
| | GCTATGAGGATGCAAAGGCATAAGAAGGATACAATGGACTTTGGGGACTTAGGGGAAAGGGTGGGAGGGG | |
| | GGTGAAGGATAAAAGAATACAAATTGGGTTCAGTGTATACTGCTCAGGTGATGGGTGCACCAGAATCTCA | |
| | CAAGTAACCACTTAATTACTTACGCATGTAACCAGATACCACCTGTTCCCCAAACACCTATGGAAATAAT | |
| | TTTGTTTTTTTTTTTAAAAAAGGAATGAGATCATGTCCTTTGCAGGGACATGGATGAAGCTGGAAGCCAT | |
| | TATCCTCAGCAAACTAACAGAGGAGCAGGAAACCAAACACCACATGTTCTCACTTGTAAGCGGAAGCTGA | |
| | ACAATGAGAACACACGGACACAGGGATGAGATCAACACACACTGGGGCCTGATGCAGGGGCCGTAGCGGG | |
| | GAGAGCATCAGGATAACTAGCTAATGCATGTGGGGCTTAATACCTAGGTGATAGGTTGATAGGTGCAGCA | |
| | AACCACCATGGGACACGTTTACCTATGTAACAAACCCGCACATCCTGCACTTGTATCCAGAACTTAAAAT | |
| | ATTTTAAAAATCTTTAGAGAATACAAAAAAAAAAAAAAAGATTCTTCAATGCATACACAATAAAATTGCA | |
| | GTTCAGTCAAACATTGGAAGTCTTTCTCTGACTGTCTAGTTGGTATCTTCATTTTCAGCTTCTTCAAGAT | |
| | CCCACTCCAAACACTGTTAGCTCAGCCAAATTGAACAGCTCATATCTCCTACCTCTGGATCTTTGGTTCT | |
| | GGTGATTGTATATTTCTGGACCATCTGGAACCCCAGCATATCACCCTACCCCACATCTCCACATCCCCAA | |
| | AATATAACCATACTTCAAGGGCAGTTCAAATACCATCTCCTTCTATCCTCCATGAAGTCAGTTATCTCTT | |
| | CCATTGGAATTATCGCCCCCTCTCCTGAACAGTACTATTTCGTGTGAATCTCCTCCAAGCCTTCTTTTCA | |
| | TTTTATATCTCATGCTGTAATTCTTGGAAAGTATGCTGTAGCTCAAGTGCAGAATTCTCATCAGTTTTAT | |
| | CTTTATATCTCTCCTAAACACTTTACCTGATGAAGAGCCTGGCATACACATAAATATATATTGAATGAAT | |
| | CAGTGATGGATTGAAAAGAGAAATGATGGATCTCCTAAATTTTAACTTTTATAAAATATTTTGATACATT | |
| | CATGACCTTACTTTAGCAAGCAATGAACGTGATGTAAACTATTGTTGATATAGTTTTTATATTGGAAGTG | |
| | TAAGTAGTTTGTGGCATGGGATTGTGACATATCCTAGGTTTCCTCATCTTCTTTTTATTGAAATGTAATT | |
| | CACAAGCCATAAAATTTGCCCCTTTAAAGTAAATGATGCAGTGGATTTTAGTATATTTACAGAGTTGTGC | |
| | AATCATCACCACTATCTAATTCCAGAACATTTCCATCTACCTAGAAACTCCATACCAGTGAGCTGCCACT | |
| | CTAATCCTCCTCTTCCCCCAGCCTCTAGAAACAATAATCCATTTTCTGTCTCTATGATTTGCCTGTTCTA | |
| | GATATTTTATAAAAATAAACATGTGGCCTTTCGTGTCTGACTTCCTTCACTTAAAAAAAAAAAAAAAAAA | |
| FIGF | TATTTTTGGAGAACATTTTGATTTTTTTCATCTCTCTCTCCCCACCCCTAAGATTGTGCAAAAAAAGCGT | 52 |
| Y12863.1 | ACCTTGCCTAATTGAAATAATTTCATTGGATTTTGATCAGAACTGATTATTTGGTTTTCTGTGTGAAGTT | |
| | TTGAGGTTTCAAACTTTCCTTCTGGAGAATGCCTTTTGAAACAATTTTCTCTAGCTGCCTGATGTCAACT | |
| | GCTTAGTAATCAGTGGATATTGAAATATTCAAAATGTACAGAGAGTGGGTAGTGGTGAATGTTTTCATGA | |
| | TGTTGTACGTCCAGCTGGTGCAGGGCTCCAGTAATGAACATGGACCAGTGAAGCGATCATCTCAGTCCAC | |
| | ATTGGAACGATCTGAACAGCAGATCAGGGCTGCTTCTAGTTTGGAGGAACTACTTCGAATTACTCACTCT | |
| | GAGGACTGGAAGCTGTGGAGATGCAGGCTGAGGCTCAAAAGTTTTACCAGTATGGACTCTCGCTCAGCAT | |
| | CCCATCGGTCCACTAGGTTTGCGGCAACTTTCTATGACATTGAAACACTAAAAGTTATAGATGAAGAATG | |
| | GCAAAGAACTCAGTGCAGCCCTAGAGAAACGTGCGTGGAGGTGGCCAGTGAGCTGGGGAAGAGTACCAAC | |
| | ACATTCTTCAAGCCCCCTTGTGTGAACGTGTTCCGATGTGGTGGCTGTTGCAATGAAGAGAGCCTTATCT | |
| | GTATGAACACCAGCACCTCGTACATTTCCAAACAGCTCTTTGAGATATCAGTGCCTTTGACATCAGTACC | |
| | TGAATTAGTGCCTGTTAAAGTTGCCAATCATACAGGTTGTAAGTGCTTGCCAACAGCCCCCCGCCATCCA | |
| | TACTCAATTATCAGAAGATCCATCCAGATCCCTGAAGAAGATCGCTGTTCCCATTCCAAGAAACTCTGTC | |
| | CTATTGACATGCTATGGGATAGCAACAAATGTAAATGTGTTTTGCAGGAGGAAAATCCACTTGCTGGAAC | |
| | AGAAGACCACTCTCATCTCCAGGAACCAGCTCTCTGTGGGCCACACATGATGTTTGACGAAGATCGTTGC | |
| | GAGTGTGTCTGTAAAACACCATGTCCCAAAGATCTAATCCAGCACCCCAAAAACTGCAGTTGCTTTGAGT | |
| | GCAAAGAAAGTCTGGAGACCTGCTGCCAGAAGCACAAGCTATTTCACCCAGACACCTGCAGCTGTGAGGA | |
| | CAGATGCCCCTTTCATACCAGACCATGTGCAAGTGGCAAAACAGCATGTGCAAAGCATTGCCGCTTTCCA | |
| | AAGGAGAAAAGGGCTGCCCAGGGGCCCCACAGCCGAAAGAATCCTTGATTCAGCGTTCCAAGTTCCCCAT | |
| | CCCTGTCATTTTTAACAGCATGCTGCTTTGCCAAGTTGCTGTCACTGTTTTTTTCCCAGGTGTTAAAAAA | |
| | AAAATCCATTTTACACAGCACCACAGTGAATCCAGACCAACCTTCCATTCACACCAGCTAAGGAGTCCCT | |
| | GGTTCATTGATGGATGTCTTCTAGCTGCAGATGCCTCTGCGCACCAAGGAATGGAGAGGAGGGGACCCAT | |
| | GTAATCCTTTTGTTTAGTTTTGTTTTTGTTTTTTGGTGAATGAGAAAGGTGTGCTGGTCATGGAATGGCA | |
| | GGTGTCATATGACTGATTACTCAGAGCAGATGAGGAAAACTGTAGTCTCTGAGTCCTTTGCTAATCGCAA | |
| | CTCTTGTGAATTATTCTGATTCTTTTTTATGCAGAATTTGATTCGTATGATCAGTACTGACTTTCTGATT | |
| | ACTGTCCAGCTTATAGTCTTCCAGTTTAATGAACTACCATCTGATGTTTCATATTTAAGTGTATTTAAAG | |
| | AAAATAAACACCATTATTCAAGCCATATAAAAAAAAAAAAAAAAAA | |
| IGF1 | TTTTGTAGATAAATGTGAGGATTTTCTCTAAATCCCTCTTCTGTTTGCTAAATCTCACTGTCACTGCTAA | 53 |
| NM_001111283.1 | ATTCAGAGCAGATAGAGCCTGCGCAATGGAATAAAGTCCTCAAAATTGAAATGTGACATTGCTCTCAACA | |
| | TCTCCCATCTCTCTGGATTTCTTTTTGCTTCATTATTCCTGCTAACCAATTCATTTTCAGACTTTGTACT | |
| | TCAGAAGCAATGGGAAAAATCAGCAGTCTTCCAACCCAATTATTTAAGTGCTGCTTTTGTGATTTCTTGA | |
| | AGGTGAAGATGCACACCATGTCCTCCTCGCATCTCTTCTACCTGGCGCTGTGCCTGCTCACCTTCACCAG | |
| | CTCTGCCACGGCTGGACCGGAGACGCTCTGCGGGGCTGAGCTGGTGGATGCTCTTCAGTTCGTGTGTGGA | |
| | GACAGGGGCTTTTATTTCAACAAGCCCACAGGGTATGGCTCCAGCAGTCGGAGGGCGCCTCAGACAGGCA | |
| | TCGTGGATGAGTGCTGCTTCCGGAGCTGTGATCTAAGGAGGCTGGAGATGTATTGCGCACCCCTCAAGCC | |
| | TGCCAAGTCAGCTCGCTCTGTCCGTGCCCAGCGCCACACCGACATGCCCAAGACCCAGAAGTATCAGCCC | |
| | CCATCTACCAACAAGAACACGAAGTCTCAGAGAAGGAAAGGAAGTACATTTGAAGAACGCAAGTAGAGGG | |
| | AGTGCAGGAAACAAGAACTACAGGATGTAGGAAGACCCTCCTGAGGAGTGAAGAGTGACATGCCACCGCA | |
| | GGATCCTTTGCTCTGCACGAGTTACCTGTTAAACTTTGGAACACCTACCAAAAAATAAGTTTGATAACAT | |
| | TTAAAAGATGGGCGTTTCCCCCAATGAAATACACAAGTAAACATTCCAACATTGTCTTTAGGAGTGATTT | |
| | GCACCTTGCAAAAATGGTCCTGGAGTTGGTAGATTGCTGTTGATCTTTTATCAATAATGTTCTATAGAAA | |
| | AGAAAAAAAAAATATATATATATATATATCTTAGTCCCTGCCTCTCAAGAGCCACAAATGCATGGGTGTT | |
| | GTATAGATCCAGTTGCACTAAATTCCTCTCTGAATCTTGGCTGCTGGAGCCATTCATTCAGCAACCTTGT | |
| | CTAAGTGGTTTATGAATTGTTTCCTTATTTGCACTTCTTTCTACACAACTCGGGCTGTTTGTTTTACAGT | |
| | GTCTGATAATCTTGTTAGTCTATACCCACCACCTCCCTTCATAACCTTTATATTTGCCGAATTTGGCCTC | |
| | CTCAAAAGCAGCAGCAAGTCGTCAAGAAGCACACCAATTCTAACCCACAAGATTCCATCTGTGGCATTTG | |
| | TACCAAATATAAGTTGGATGCATTTTATTTTAGACACAAAGCTTTATTTTTCCACATCATGCTTACAAAA | |
| | AAGAATAATGCAAATAGTTGCAACTTTGAGGCCAATCATTTTTAGGCATATGTTTTAAACATAGAAAGTT | |
| | TCTTCAACTCAAAAGAGTTCCTTCAAATGATGAGTTAATGTGCAACCTAATTAGTAACTTTCCTCTTTTT | |
| | ATTTTTTCCATATAGAGCACTATGTAAATTTAGCATATCAATTATACAGGATATATCAAACAGTATGTAA | |
| | AACTCTGTTTTTTAGTATAATGGTGCTATTTTGTAGTTTGTTATATGAAAGAGTCTGGCCAAAACGGTAA | |
| | TACGTGAAAGCAAAACAATAGGGGAAGCCTGGAGCCAAAGATGACACAAGGGGAAGGGTACTGAAAACAC | |
| | CATCCATTTGGGAAAGAAGGCAAAGTCCCCCCAGTTATGCCTTCCAAGAGGAACTTCAGACACAAAAGTC | |
| | CACTGATGCAAATTGGACTGGCGAGTCCAGAGAGGAAACTGTGGAATGGAAAAAGCAGAAGGCTAGGAAT | |
| | TTTAGCAGTCCTGGTTTCTTTTTCTCATGGAAGAAATGAACATCTGCCAGCTGTGTCATGGACTCACCAC | |
| | TGTGTGACCTTGGGCAAGTCACTTCACCTCTCTGTGCCTCAGTTTCCTCATCTGCAAAATGGGGGCAATA | |
| | TGTCATCTACCTACCTCAAAGGGGTGGTATAAGGTTTAAAAAGATAAAGATTCAGATTTTTTTTACCCTG | |
| | GGTTGCTGTAAGGGTGCAACATCAGGGCGCTTGAGTTGCTGAGATGCAAGGAATTCTATAAATAACCCAT | |
| | TCATAGCATAGCTAGAGATTGGTGAATTGAATGCTCCTGACATCTCAGTTCTTGTCAGTGAAGCTATCCA | |
| | AATAACTGGCCAACTAGTTGTTAAAAGCTAACAGCTCAATCTCTTAAAACACTTTTCAAAATATGTGGGA | |
| | AGCATTTGATTTTCAATTTGATTTTGAATTCTGCATTTGGTTTTATGAATACAAAGATAAGTGAAAAGAG | |
| | AGAAAGGAAAAGAAAAAGGAGAAAAACAAAGAGATTTCTACCAGTGAAAGGGGAATTAATTACTCTTTGT | |
| | TAGCACTCACTGACTCTTCTATGCAGTTACTACATATCTAGTAAAACCTCGTTTAATACTATAAATAATA | |
| | TTCTATTCATTTTGAAAAACACAATGATTCCTTCTTTTCTAGGCAATATAAGGAAAGTGATCCAAAATTT | |
| | GAAATATTAAAATAATATCTAATAAAAAGTCACAAAGTTATCTTCTTTAACAAACTTTACTCTTATTCTT | |
| | AGCTGTATATACATTTTTTTAAAAGTTTGTTAAAATATGCTTGACTAGAGTTTCCAGTTGAAAGGCAAAA | |
| | ACTTCCATCACAACAAGAAATTTCCCATGCCTGCTCAGAAGGGTAGCCCCTAGCTCTCTGTGAATGTGTT | |
| | TTATCCATTCAACTGAAAATTGGTATCAAGAAAGTCCACTGGTTAGTGTACTAGTCCATCATAGCCTAGA | |
| | AAATGATCCCTATCTGCAGATCAAGATTTTCTCATTAGAACAATGAATTATCCAGCATTCAGATCTTTCT | |
| | AGTCACCTTAGAACTTTTTGGTTAAAAGTACCCAGGCTTGATTATTTCATGCAAATTCTATATTTTACAT | |
| | TCTTGGAAAGTCTATATGAAAAACAAAAATAACATCTTCAGTTTTTCTCCCACTGGGTCACCTCAAGGAT | |
| | CAGAGGCCAGGAAAAAAAAAAAAAAGACTCCCTGGATCTCTGAATATATGCAAAAAGAAGGCCCCATTTA | |
| | GTGGAGCCAGCAATCCTGTTCAGTCAACAAGTATTTTAACTCTCAGTCCAACATTATTTGAATTGAGCAC | |
| | CTCAAGCATGCTTAGCAATGTTCTAATCACTATGGACAGATGTAAAAGAAACTATACATCATTTTTGCCC | |
| | TCTGCCTGTTTTCCAGACATACAGGTTCTGTGGAATAAGATACTGGACTCCTCTTCCCAAGATGGCACTT | |
| | CTTTTTATTTCTTGTCCCCAGTGTGTACCTTTTAAAATTATTCCCTCTCAACAAAACTTTATAGGCAGTC | |
| | TTCTGCAGACTTAACGTGTTTTCTGTCATAGTTAGATGTGATAATTCTAAGAGTGTCTATGACTTATTTC | |
| | CTTCACTTAATTCTATCCACAGTCAAAAATCCCCCAAGGAGGAAAGCTGAAAGATGCACTGCCATATTAT | |
| | CTTTCTTAACTTTTTCCAACACATAATCCTCTCCAACTGGATTATAAATAAATTGAAAATAACTCATTAT | |
| | ACCAATTCACTATTTTATTTTTTAATGAATTAAAACTAGAAAACAAATTGATGCAAACCCTGGAAGTCAG | |
| | TTGATTACTATATACTACAGCAGAATGACTCAGATTTCATAGAAAGGAGCAACCAAAATGTCACAACCCA | |
| | AAACTTTACAAGCTTTGCTTCAGAATTAGATTGCTTTATAATTCTTGAATGAGGCAATTTCAAGATATTT | |
| | GTAAAAGAACAGTAAACATTGGTAAGAATGAGCTTTCAACTCATAGGCTTATTTCCAATTTAATTGACCA | |
| | TACTGGATACTTAGGTCAAATTTCTGTTCTCTCTTCCCCAAATAATATTAAAGTATTATTTGAACTTTTT | |
| | AAGATGAGGCAGTTCCCCTGAAAAAGTTAATGCAGCTCTCCATCAGAATCCACTCTTCTAGGGATATGAA | |
| | AATCTCTTAACACCCACCCTACATACACAGACACACACACACACACACACACACACACACACACACACAT | |
| | TCACCCTAAGGATCCAATGGAATACTGAAAAGAAATCACTTCCTTGAAAATTTTATTAAAAAACAAACAA | |
| | ACAAACAAAAAGCCTGTCCACCCTTGAGAATCCTTCCTCTCCTTGGAACGTCAATGTTTGTGTAGATGAA | |
| | ACCATCTCATGCTCTGTGGCTCCAGGGTTTCTGTTACTATTTTATGCACTTGGGAGAAGGCTTAGAATAA | |
| | AAGATGTAGCACATTTTGCTTTCCCATTTATTGTTTGGCCAGCTATGCCAATGTGGTGCTATTGTTTCTT | |
| | TAAGAAAGTACTTGACTAAAAAAAAAAGAAAAAAAGAAAAAAAAGAAAGCATAGACATATTTTTTTAAAG | |
| | TATAAAAACAACAATTCTATAGATAGATGGCTTAATAAAATAGCATTAGGTCTATCTAGCCACCACCACC | |
| | TTTCAACTTTTTATCACTCACAAGTAGTGTACTGTTCACCAAATTGTGAATTTGGGGGTGCAGGGGCAGG | |
| | AGTTGGAAATTTTTTAAAGTTAGAAGGCTCCATTGTTTTGTTGGCTCTCAAACTTAGCAAAATTAGCAAT | |
| | ATATTATCCAATCTTCTGAACTTGATCAAGAGCATGGAGAATAAACGCGGGAAAAAAGATCTTATAGGCA | |
| | AATAGAAGAATTTAAAAGATAAGTAAGTTCCTTATTGATTTTTGTGCACTCTGCTCTAAAACAGATATTC | |
| | AGCAAGTGGAGAAAATAAGAACAAAGAGAAAAAATACATAGATTTACCTGCAAAAAATAGCTTCTGCCAA | |
| | ATCCCCCTTGGGTATTCTTTGGCATTTACTGGTTTATAGAAGACATTCTCCCTTCACCCAGACATCTCAA | |
| | AGAGCAGTAGCTCTCATGAAAAGCAATCACTGATCTCATTTGGGAAATGTTGGAAAGTATTTCCTTATGA | |
| | GATGGGGGTTATCTACTGATAAAGAAAGAATTTATGAGAAATTGTTGAAAGAGATGGCTAACAATCTGTG | |
| | AAGATTTTTTGTTTCTTGTTTTTGTTTTTTTTTTTTTTTTACTTTATACAGTCTTTATGAATTTCTTAAT | |
| | GTTCAAAATGACTTGGTTCTTTTCTTCTTTTTTTATATCAGAATGAGGAATAATAAGTTAAACCCACATA | |
| | GACTCTTTAAAACTATAGGCTAGATAGAAATGTATGTTTGACTTGTTGAAGCTATAATCAGACTATTTAA | |
| | AATGTTTTGCTATTTTTAATCTTAAAAGATTGTGCTAATTTATTAGAGCAGAACCTGTTTGGCTCTCCTC | |
| | AGAAGAAAGAATCTTTCCATTCAAATCACATGGCTTTCCACCAATATTTTCAAAAGATAAATCTGATTTA | |
| | TGCAATGGCATCATTTATTTTAAAACAGAAGAATTGTGAAAGTTTATGCCCCTCCCTTGCAAAGACCATA | |
| | AAGTCCAGATCTGGTAGGGGGGCAACAACAAAAGGAAAATGTTGTTGATTCTTGGTTTTGGATTTTGTTT | |
| | TGTTTTCAATGCTAGTGTTTAATCCTGTAGTACATATTTGCTTATTGCTATTTTAATATTTTATAAGACC | |
| | TTCCTGTTAGGTATTAGAAAGTGATACATAGATATCTTTTTTGTGTAATTTCTATTTAAAAAAGAGAGAA | |
| | GACTGTCAGAAGCTTTAAGTGCATATGGTACAGGATAAAGATATCAATTTAAATAACCAATTCCTATCTG | |
| | GAACAATGCTTTTGTTTTTTAAAGAAACCTCTCACAGATAAGACAGAGGCCCAGGGGATTTTTGAAGCTG | |
| | TCTTTATTCTGCCCCCATCCCAACCCAGCCCTTATTATTTTAGTATCTGCCTCAGAATTTTATAGAGGGC | |
| | TGACCAAGCTGAAACTCTAGAATTAAAGGAACCTCACTGAAAACATATATTTCACGTGTTCCCTCTTTTT | |
| | TTTTTTCCTTTTTGTGAGATGGGGTCTCGCACTGTCCCCCAGGCTGGAGTGCAGTGGCATGATCTCGGCT | |
| | CACTGCAACCTCCACCTCCTGGGTTTAAGCGATTCTCCTGCCTCAGCCTCCTGAGTAGCTGGGATTACAG | |
| | GCACCCACCACTATGCCCGGCTAATTTTTTGGATTTTTAATAGAGACGGGGTTTTACCATGTTGGCCAGG | |
| | TTGGTCTCAAACTCCTGACCTTGTGATTTGCCCGCCTCAGCCTCCCAAATTGCTGGGATTACAGGCATGA | |
| | GCCACCACACCCTGCCCATGTGTTCCCTCTTAATGTATGATTACATGGATCTTAAACATGATCCTTCTCT | |
| | CCTCATTCTTCAACTATCTTTGATGGGGTCTTTCAAGGGGAAAAAAATCCAAGCTTTTTTAAAGTAAAAA | |
| | AAAAAAAAGAGAGGACACAAAACCAAATGTTACTGCTCAACTGAAATATGAGTTAAGATGGAGACAGAGT | |
| | TTCTCCTAATAACCGGAGCTGAATTACCTTTCACTTTCAAAAACATGACCTTCCACAATCCTTAGAATCT | |
| | GCCTTTTTTTATATTACTGAGGCCTAAAAGTAAACATTACTCATTTTATTTTGCCCAAAATGCACTGATG | |
| | TAAAGTAGGAAAAATAAAAACAGAGCTCTAAAATCCCTTTCAAGCCACCCATTGACCCCACTCACCAACT | |
| | CATAGCAAAGTCACTTCTGTTAATCCCTTAATCTGATTTTGTTTGGATATTTATCTTGTACCCGCTGCTA | |
| | AACACACTGCAGGAGGGACTCTGAAACCTCAAGCTGTCTACTTACATCTTTTATCTGTGTCTGTGTATCA | |
| | TGAAAATGTCTATTCAAAATATCAAAACCTTTCAAATATCACGCAGCTTATATTCAGTTTACATAAAGGC | |
| | CCCAAATACCATGTCAGATCTTTTTGGTAAAAGAGTTAATGAACTATGAGAATTGGGATTACATCATGTA | |
| | TTTTGCCTCATGTATTTTTATCACACTTATAGGCCAAGTGTGATAAATAAACTTACAGACACTGAATTAA | |
| | TTTCCCCTGCTACTTTGAAACCAGAAAATAATGACTGGCCATTCGTTACATCTGTCTTAGTTGAAAAGCA | |
| | TATTTTTTATTAAATTAATTCTGATTGTATTTGAAATTATTATTCAATTCACTTATGGCAGAGGAATATC | |
| | AATCCTAATGACTTCTAAAAATGTAACTAATTGAATCATTATCTTACATTTACTGTTTAATAAGCATATT | |
| | TTGAAAATGTATGGCTAGAGTGTCATAATAAAATGGTATATCTTTCTTTAGTAATTACATTAAAATTAGT | |
| | CATGTTTGATTAATTAGTTC | |
| KPNA1 | GCACTGCGAACGCCGGCTGAGCTGAGTCTCGCTGCTCGGTGCGAGGCGGCGGAGAGCGAGGCCTGGTGAG | 54 |
| NM_002264.3 | CACCGCCGAGGCGCGGGCCAGCTCTTCGAGGTTGTGCGCGGGAGTGGCACGGCGGGCGGGCGAGCGAGGG | |
| | GCTAACTTCAGCGGTGGCACCGGGATCGGTTGCCTTGAGCCTGAAATCATGACCACCCCAGGAAAAGAGA | |
| | ACTTTCGCCTGAAAAGTTACAAGAACAAATCTCTGAATCCCGATGAGATGCGCAGGAGGAGGGAGGAAGA | |
| | AGGACTGCAGTTACGAAAGCAGAAAAGAGAAGAGCAGTTATTCAAGCGGAGAAATGTTGCTACAGCAGAA | |
| | GAAGAAACAGAAGAAGAAGTTATGTCAGATGGAGGCTTTCATGAGGCTCAGATTAGTAACATGGAGATGG | |
| | CACCAGGTGGTGTCATCACTTCTGACATGATTGAAATGATATTTTCCAAAAGCCCAGAGCAACAGCTTTC | |
| | AGCAACACAGAAATTCAGGAAGCTGCTTTCAAAAGAACCTAACCCTCCTATTGATGAAGTTATCAGCACA | |
| | CCAGGAGTAGTGGCCAGGTTTGTGGAGTTCCTCAAACGAAAAGAGAATTGTACACTGCAGTTTGAATCAG | |
| | CTTGGGTACTGACAAATATTGCTTCAGGAAATTCTCTTCAGACCCGAATTGTGATTCAGGCAGGAGCTGT | |
| | GCCCATCTTCATAGAGTTGCTCAGCTCAGAGTTTGAAGATGTCCAGGAACAGGCAGTCTGGGCTCTTGGC | |
| | AACATTGCTGGAGATAGTACCATGTGCAGGGACTATGTCTTAGACTGCAATATCCTTCCCCCTCTTTTGC | |
| | AGTTATTTTCAAAGCAAAACCGCCTGACCATGACCCGGAATGCAGTATGGGCTTTGTCTAATCTCTGTAG | |
| | AGGGAAAAGTCCACCTCCAGAATTTGCAAAGGTTTCTCCATGTCTGAATGTGCTTTCCTGGTTGCTGTTT | |
| | GTCAGTGACACTGATGTACTGGCTGATGCCTGCTGGGCCCTCTCATATCTATCAGATGGACCCAATGATA | |
| | AAATTCAAGCGGTCATCGATGCGGGAGTATGTAGGAGACTTGTGGAACTGCTGATGCATAATGATTATAA | |
| | AGTGGTTTCTCCTGCTTTGCGAGCTGTGGGAAACATTGTCACAGGGGATGATATTCAGACACAGGTAATT | |
| | CTGAATTGCTCAGCTCTGCAGAGTTTATTGCATTTGCTGAGTAGCCCAAAGGAATCTATCAAAAAGGAAG | |
| | CATGTTGGACGATATCTAATATTACAGCTGGAAATAGGGCACAGATCCAGACTGTGATAGATGCCAACAT | |
| | TTTCCCAGCCCTCATTAGTATTTTACAAACTGCTGAATTTCGGACAAGAAAAGAAGCAGCTTGGGCCATC | |
| | ACAAATGCAACTTCTGGAGGATCAGCTGAACAGATCAAGTACCTAGTAGAACTGGGTTGTATCAAGCCGC | |
| | TCTGTGATCTCCTCACGGTCATGGACTCTAAGATTGTACAGGTTGCCCTAAATGGCTTGGAAAATATCCT | |
| | GAGGCTTGGAGAACAGGAAGCCAAAAGGAATGGCACTGGCATTAACCCTTACTGTGCTTTGATTGAAGAA | |
| | GCTTATGGTCTGGATAAAATTGAGTTCTTACAGAGTCATGAAAACCAGGAGATCTACCAAAAGGCCTTTG | |
| | ATCTTATTGAGCATTACTTCGGGACCGAAGATGAAGACAGCAGCATTGCACCCCAGGTTGACCTTAACCA | |
| | GCAGCAGTACATCTTCCAACAGTGTGAGGCTCCTATGGAAGGTTTCCAGCTTTGAAGCAATACTCTGCTT | |
| | TCACGTACCTGTGTCAGACCAGGCTACCCAGTCGAGTCCTCTTGTGGAGCCCACAGTCCTCATGGAGCTA | |
| | ACTTCTCAAATGTTTTCCATAATACTGTTTGCGCTCATTTGCTTGCCTTGCGCACCTGCTCTCTTACACA | |
| | CATCTGGAAAACCTCCGGCTCTCTGTGGTGGAATACCCTTCTAATAAAAGGGTAACCAGAACGGCCCACT | |
| | CTCTTTTACGGAAAAATCCCTAGGCTTTGGAGATCCGCACTTACATTAGAGTTATGGGAATATACACATA | |
| | TTAATGTGGCTCCCTTTTTCTTGTGGGGGAATAAAAGAGGACTCCTCCTCATTCCCTTTAACATGGGGGA | |
| | AAAAACTGACATTAAAAGATGAGACTAAATCTTTATCTTGAATTTTACACAACTACTTACGACAAGGGAG | |
| | ATGTTTAGACCTGTTGTGTATACTTCAGAGTACTTTTCATGAGTTCTTCCACAGTGAACCCTTGGATTAC | |
| | CTGGTGGCTTTTTCTAGCCAGATTTGCATTAATCCTTACTGAGATTGGATGGTTTTCTTTCCTCTATTGG | |
| | CGCCATTCTTCAGATATTAAAGTTAAACCATCCACTCCCTCACCTTCAGCCTTCAGTGAATGTGCTTTCT | |
| | AGTTGTCAGGAATGCTGAAGAATTAACACTTTGACTCCTAAATGTGATACTGGTTTGTAGATTCCCTTAG | |
| | AGCAGAAAGGAGAGGGGCACATATTAATTTGTATCGCTTTTGCTTCTCTTTGGTCTTTTGTGTCTTAGAA | |
| | TTTGGAAGTGGTTCATTTCTGTTGCTGGTATGAGGATTTCGAATACTTAGTAATCGAAAACCATATCCTG | |
| | TAATTTAATAAAAAAAACTAAGGACGAAAAAACCCTCCAATTTTCCCAAATGCAATCAGTGTAACTAGGG | |
| | GCTGTGTTTCTGCATTAAAATAAATGTTTCAGGCTTTGTGGTCCTGATCAAGGTCCTCATTAAAAAATTG | |
| | GAGTTCACCCTAGGTGCTTTTCCCCTCTGTGACTGGCAGATAACACATACTTTTGAAAGTAACTTTGGGA | |
| | TTTTTTTCTTAGGTGCAGCTCGATTCTAATCTTTTCATGCTGCACACGATTCCTTTAATGTAGCATCCTT | |
| | ATCTGAAAGAAATAACCATCTTCTCAACATGACCTGCTTAACCCAAATAAGAACAGTGATCTTATAACCT | |
| | CATTGTTTCCTAATCATTTTATTTCATCTCCTGCTAGTACTGTGCCGCTTCCCCCTCCCCCCACACAAAA | |
| | TAAAAACAGTATCTGCCTTCTGGCTCATTTAATGATGACTGCAATCTGTACCTGCAAATGGCGCTTCCAG | |
| | TACTGTGTTCAGTGATCCACATTTGTGCTTGGACTGGAATGAAAAAATACGCTTAATTGCCAAGACAACT | |
| | GCAAATGAGTTCAATACGACTTCTCGGTGCTAGTTGGCCATCTTGACTCAATGTTGGGATACACTACCAG | |
| | AGAAGATTTTTTTGTTGATGTGCTGTTCAAAGTGAATTCTGAAGGAAAAGGTTGCTCACCTCTGTTTCAG | |
| | AGCATACCCTTTTAAACCTTTTTAGACTTGTCCTCTTCTAGAATTCATTATAACCCCAAAGTGTAAAAAC | |
| | TATTTGGAAGTTGCCCCTGACAAGCTATTATACATCTCTGGTAAATCCTGCTGAATGTAAGGGATATTCA | |
| | GAGCTTTTCATACCTCATCATGATGTTATTTAAGCAGCCAACTTATGTGACCTGATTTAAACTTTTAAAA | |
| | AATCCACTTCATTCAAACTAGAAAGAGTCAAAGACAAAGGACATTTATCAGCCAAGAGTGTGACGCATTC | |
| | TTCGCATCTAGTCTGTAGTAGTGTCTGTGCTCTGGGATGGATACCGTCTGATGTCTGTTTGTTATTGATG | |
| | GCGCAGCCACTGCAAAACTAGTCAACTCCCATCTATAACTGTTACTTTTTCTAGTGCTGCTTTGTGCTGA | |
| | GAGAACATTTTAGTTTACTGCACTTGACCTGTAAAAGACTGATTCTTTGTAATTTTAGGGATAAATTAGG | |
| | TGGTTAATTTAAAGAAGAAATTTCAATGTTGCCTTTACATCACATTAAAATATAACTTCTTTCAGAAGGA | |
| | TAATAGAAGCACTGATTCATAGTAAAAATCTTGTTTTTAGCTTTGACTTTTTTGTGGCTGTTTTTTAAAA | |
| | TTGTAAATTACTAGTAACATGTCATTTCTATAGGATGTTTTAAATTATGTACCTTCCATTGGATAGTTAA | |
| | AATAATTTCATTTTATAAGCCAATTTGAGTGGGAAAGATACAAAGCACACAGTTGTCTCCCCACATTAGG | |
| | AAGAGTAGTGTGCATTCAGACATTCGGAATTTTTGCTAGTAGTTGGAGATGTTTCAGTGAGTGAATTAAA | |
| | ACAAAGTCTATTTAACTGACGTGATCTATTTTGTGTCTAAAACAGAGGAATTTATCTTGTCCTAGAAGTT | |
| | CATGAACTATAAGATCTAAGTTTTTTTTTCTTTTTTAACAATAAAATGATTTTTTCTTAAAGTATCAAAG | |
| | TTGGAATTGGCTAAAAGTGAAGTAGCATAACTCAGATATGTTGGAACTTGGTACTGAAGCAGGCTTTTTG | |
| | GTAACAGAAATGACATTTTAAGGGGTAACTGTATATCCTGTTTTTAGTTCTTTGCCTCTCAGATTCTGTT | |
| | AACTTAGTTTAAATTCACTGAATACCCTACCACTAAGGCGTTGCTCATTACAAAAGCATGTTAATTTCAA | |
| | TACAGGAAAACTCTTTTGTAGTTTTATATATGGATTGGGGAAAGTGACTTTGTTTTACTTTTCCTTTTTA | |
| | TTCCCCTCCATCCTCCAAACTTCCAATCTATATTATTTGTAATGAGAACTTTGGTGGGGGAAAAAAAGCA | |
| | TTAAGAGAATTTTGGATGTAAAGGCATCTGGTATCTGATGGACCAGCAGGTAGATGTGGTTGGATTGAGA | |
| | AATTTTGGGTAAGGTAGATGATAGAAGAAAGAGATTTTAGGAGACACAGTTCTCTGTGGAACACTTTCTT | |
| | TCATGTTCCTGTAACTAATTGATCAAGACCCTTTTAAACGCTTATCTTTGTCAGTTCCGCTTTTGAAAAA | |
| | ACTATTGCCCTAGGATTGTTTCTTCCATATGACAGATGAAGGTTATTGGCTCTGAGTCATTTTTGGCATT | |
| | ATCGTCACAGATAAAAAGATTGGCAATTAATCTCATAAAAAATCTGAATTATTCCAGATTGCTGCCGATT | |
| | TTTGCCTAAGAAACAATATGTAAGTATATTTTATAAACCAAACTTTGTCAACCAATTCTATTGTACGTCT | |
| | ACCCACAGGCAACTTTGAATTTACTTCTCTAGTGCTAAATAAACATTTCAGCGATTTAATCCCCCAACTT | |
| | GGGGGATGCATTATGAAAAGGTTTTCCTGGAGTCAAGGGGTTTTTCTTTCTCGCTAGTTTTGTGAAAATT | |
| | TTTATATCAATAGGCAAATCATTATAACTTTTTAGGGGTTGATGGTTTTTAAGTATATTGGAAATTGTGG | |
| | TGTCTAAGGATGATGTTCAGTGAAGAAAAGGGATCCACTTTTAGAAACCAGCATTGTTTGCTTTCAACTT | |
| | TCATACTGTATGCTAACTCCTACGTTCCAAAATGTGCTCATTTGCAGACACAGGTATGCCTATATACATG | |
| | GAAGTCTCAAATCTGAATTTTTATCCATCTCAATATGACCATTTCTCTCTGTTGTGAGCTGAACAGATTA | |
| | AGTATATATCTGCCAGGTTGGGAAATATTTTGGTCTATCTTTTCCTGTCATCAGAACTTAATTTAAAAAA | |
| | ATTATCAAAGGTCAGATGTGACTACTACAGTAAGTTGGCTATCATAAAGAATATTCCATAAAATGTTTTA | |
| | TCTGCCATACAAAATTACTGGGTTTATGGCCGGATGTGGTGGCTCATGCCTGTAATCCCAGCAGTTCAGG | |
| | ATTACAGGTTATATACAGGTTATAACAATGGATACCAGGACATCAGAATATCTGATAAAGCAAATATTTA | |
| | TATGCTAATTTAAAATATCAAATTGCTACTGGACATAAAATACATCTGGAAGCTTGGGGTAAGAAGAAAG | |
| | AAAAGAAGTGTTCCGTTCTGTTTTCAACTAAGGGTAAACGAAGTCCCAGAGTGTTTTCCCTGTAGGTCAA | |
| | ATTAAGGTAACATGTCTTTATTTGATCATCTATTGTACACCAGATACCTGGCTAAGGGCTTTCCTTTTTT | |
| | CTCATGTAGTCTTCCAAATGTTCTTTGATAATTGTCACTATATTATAGATGACAAAGTGAAGACTTACGA | |
| | GAAATTACTTTGCCCCAAGGTTACAACACTTAGATGGCTGTCCAAGGGCGGGGAAGAGCCCTGCAAATTC | |
| | TGTGTCTTGAAGAAAGCAGTGGCCACGCAGTAGTTCCGTGCCCAGGATCTCCCAGAACTAGACTTGGCAA | |
| | CCACAGCTGGGCCAGCCTTTTTTGTTAGACCATTCTTCCTGACTCCTGCTTACCATCAGCACCCTTAAAA | |
| | TGACGAAATCAGGCTTAAGTTGCTTTTAGGTTACACAGACTGGAGTGTAGGCCCTCTCAGGCCAAACATC | |
| | TTTCCTCTTCTGTGGTGCTAAAATTCTGTATGACCAGACAAGTATGGTAATAGGTTTTTTTTTTTTTTTT | |
| | TTTTGTGCAAATGATTTTGTGTTTAGTAAAATAATGGCTAAACACATGGATCCATTCAAACGCACAAATG | |
| | TGGAAAGTATTGACACGGAAGGAAAGGCTTTGAAGAATTACTGCCTCAGGAAGCAGTGCCATGGATGCGA | |
| | ATTTAACACAGTCTACTTCTTCCTAAAGGAATATCATCCCAAGGAATGTCAAAAATTAAAATCACCTTTT | |
| | AATGTACTGGTTGTTGAGTGTTTCTGCTTTACCTCAAGTCATTCTGACCACTCTACATCCTGCTTCAAAG | |
| | TGTTCTGACACTTAGATTTGGAATGGCTCTAATGATTCTTTGTACTTGAATGTGGTCTGTCAGGCCATGG | |
| | GTGAGTGCCTTGCACATAGTAGACATTCAATAAATACTAAATGAAGGAATATGCATGCATCTTTGTGATG | |
| | TTAGTAAAGGGTGCTTGATAAAAGAAAAT | |
| KRAS | GGCCGCGGCGGCGGAGGCAGCAGCGGCGGCGGCAGTGGCGGCGGCGAAGGTGGCGGCGGCTCGGCCAGTA | 55 |
| NM_033360.2 | CTCCCGGCCCCCGCCATTTCGGACTGGGAGCGAGCGCGGCGCAGGCACTGAAGGCGGCGGCGGGGCCAGA | |
| | GGCTCAGCGGCTCCCAGGTGCGGGAGAGAGGCCTGCTGAAAATGACTGAATATAAACTTGTGGTAGTTGG | |
| | AGCTGGTGGCGTAGGCAAGAGTGCCTTGACGATACAGCTAATTCAGAATCATTTTGTGGACGAATATGAT | |
| | CCAACAATAGAGGATTCCTACAGGAAGCAAGTAGTAATTGATGGAGAAACCTGTCTCTTGGATATTCTCG | |
| | ACACAGCAGGTCAAGAGGAGTACAGTGCAATGAGGGACCAGTACATGAGGACTGGGGAGGGCTTTCTTTG | |
| | TGTATTTGCCATAAATAATACTAAATCATTTGAAGATATTCACCATTATAGAGAACAAATTAAAAGAGTT | |
| | AAGGACTCTGAAGATGTACCTATGGTCCTAGTAGGAAATAAATGTGATTTGCCTTCTAGAACAGTAGACA | |
| | CAAAACAGGCTCAGGACTTAGCAAGAAGTTATGGAATTCCTTTTATTGAAACATCAGCAAAGACAAGACA | |
| | GAGAGTGGAGGATGCTTTTTATACATTGGTGAGGGAGATCCGACAATACAGATTGAAAAAAATCAGCAAA | |
| | GAAGAAAAGACTCCTGGCTGTGTGAAAATTAAAAAATGCATTATAATGTAATCTGGGTGTTGATGATGCC | |
| | TTCTATACATTAGTTCGAGAAATTCGAAAACATAAAGAAAAGATGAGCAAAGATGGTAAAAAGAAGAAAA | |
| | AGAAGTCAAAGACAAAGTGTGTAATTATGTAAATACAATTTGTACTTTTTTCTTAAGGCATACTAGTACA | |
| | AGTGGTAATTTTTGTACATTACACTAAATTATTAGCATTTGTTTTAGCATTACCTAATTTTTTTCCTGCT | |
| | CCATGCAGACTGTTAGCTTTTACCTTAAATGCTTATTTTAAAATGACAGTGGAAGTTTTTTTTTCCTCTA | |
| | AGTGCCAGTATTCCCAGAGTTTTGGTTTTTGAACTAGCAATGCCTGTGAAAAAGAAACTGAATACCTAAG | |
| | ATTTCTGTCTTGGGGTTTTTGGTGCATGCAGTTGATTACTTCTTATTTTTCTTACCAATTGTGAATGTTG | |
| | GTGTGAAACAAATTAATGAAGCTTTTGAATCATCCCTATTCTGTGTTTTATCTAGTCACATAAATGGATT | |
| | AATTACTAATTTCAGTTGAGACCTTCTAATTGGTTTTTACTGAAACATTGAGGGAACACAAATTTATGGG | |
| | CTTCCTGATGATGATTCTTCTAGGCATCATGTCCTATAGTTTGTCATCCCTGATGAATGTAAAGTTACAC | |
| | TGTTCACAAAGGTTTTGTCTCCTTTCCACTGCTATTAGTCATGGTCACTCTCCCCAAAATATTATATTTT | |
| | TTCTATAAAAAGAAAAAAATGGAAAAAAATTACAAGGCAATGGAAACTATTATAAGGCCATTTCCTTTTC | |
| | ACATTAGATAAATTACTATAAAGACTCCTAATAGCTTTTCCTGTTAAGGCAGACCCAGTATGAAATGGGG | |
| | ATTATTATAGCAACCATTTTGGGGCTATATTTACATGCTACTAAATTTTTATAATAATTGAAAAGATTTT | |
| | AACAAGTATAAAAAATTCTCATAGGAATTAAATGTAGTCTCCCTGTGTCAGACTGCTCTTTCATAGTATA | |
| | ACTTTAAATCTTTTCTTCAACTTGAGTCTTTGAAGATAGTTTTAATTCTGCTTGTGACATTAAAAGATTA | |
| | TTTGGGCCAGTTATAGCTTATTAGGTGTTGAAGAGACCAAGGTTGCAAGGCCAGGCCCTGTGTGAACCTT | |
| | TGAGCTTTCATAGAGAGTTTCACAGCATGGACTGTGTCCCCACGGTCATCCAGTGTTGTCATGCATTGGT | |
| | TAGTCAAAATGGGGAGGGACTAGGGCAGTTTGGATAGCTCAACAAGATACAATCTCACTCTGTGGTGGTC | |
| | CTGCTGACAAATCAAGAGCATTGCTTTTGTTTCTTAAGAAAACAAACTCTTTTTTAAAAATTACTTTTAA | |
| | ATATTAACTCAAAAGTTGAGATTTTGGGGTGGTGGTGTGCCAAGACATTAATTTTTTTTTTAAACAATGA | |
| | AGTGAAAAAGTTTTACAATCTCTAGGTTTGGCTAGTTCTCTTAACACTGGTTAAATTAACATTGCATAAA | |
| | CACTTTTCAAGTCTGATCCATATTTAATAATGCTTTAAAATAAAAATAAAAACAATCCTTTTGATAAATT | |
| | TAAAATGTTACTTATTTTAAAATAAATGAAGTGAGATGGCATGGTGAGGTGAAAGTATCACTGGACTAGG | |
| | AAGAAGGTGACTTAGGTTCTAGATAGGTGTCTTTTAGGACTCTGATTTTGAGGACATCACTTACTATCCA | |
| | TTTCTTCATGTTAAAAGAAGTCATCTCAAACTCTTAGTTTTTTTTTTTTACAACTATGTAATTTATATTC | |
| | CATTTACATAAGGATACACTTATTTGTCAAGCTCAGCACAATCTGTAAATTTTTAACCTATGTTACACCA | |
| | TCTTCAGTGCCAGTCTTGGGCAAAATTGTGCAAGAGGTGAAGTTTATATTTGAATATCCATTCTCGTTTT | |
| | AGGACTCTTCTTCCATATTAGTGTCATCTTGCCTCCCTACCTTCCACATGCCCCATGACTTGATGCAGTT | |
| | TTAATACTTGTAATTCCCCTAACCATAAGATTTACTGCTGCTGTGGATATCTCCATGAAGTTTTCCCACT | |
| | GAGTCACATCAGAAATGCCCTACATCTTATTTCCTCAGGGCTCAAGAGAATCTGACAGATACCATAAAGG | |
| | GATTTGACCTAATCACTAATTTTCAGGTGGTGGCTGATGCTTTGAACATCTCTTTGCTGCCCAATCCATT | |
| | AGCGACAGTAGGATTTTTCAAACCTGGTATGAATAGACAGAACCCTATCCAGTGGAAGGAGAATTTAATA | |
| | AAGATAGTGCTGAAAGAATTCCTTAGGTAATCTATAACTAGGACTACTCCTGGTAACAGTAATACATTCC | |
| | ATTGTTTTAGTAACCAGAAATCTTCATGCAATGAAAAATACTTTAATTCATGAAGCTTACTTTTTTTTTT | |
| | TGGTGTCAGAGTCTCGCTCTTGTCACCCAGGCTGGAATGCAGTGGCGCCATCTCAGCTCACTGCAACCTC | |
| | CATCTCCCAGGTTCAAGCGATTCTCGTGCCTCGGCCTCCTGAGTAGCTGGGATTACAGGCGTGTGCCACT | |
| | ACACTCAACTAATTTTTGTATTTTTAGGAGAGACGGGGTTTCACCCTGTTGGCCAGGCTGGTCTCGAACT | |
| | CCTGACCTCAAGTGATTCACCCACCTTGGCCTCATAAACCTGTTTTGCAGAACTCATTTATTCAGCAAAT | |
| | ATTTATTGAGTGCCTACCAGATGCCAGTCACCGCACAAGGCACTGGGTATATGGTATCCCCAAACAAGAG | |
| | ACATAATCCCGGTCCTTAGGTAGTGCTAGTGTGGTCTGTAATATCTTACTAAGGCCTTTGGTATACGACC | |
| | CAGAGATAACACGATGCGTATTTTAGTTTTGCAAAGAAGGGGTTTGGTCTCTGTGCCAGCTCTATAATTG | |
| | TTTTGCTACGATTCCACTGAAACTCTTCGATCAAGCTACTTTATGTAAATCACTTCATTGTTTTAAAGGA | |
| | ATAAACTTGATTATATTGTTTTTTTATTTGGCATAACTGTGATTCTTTTAGGACAATTACTGTACACATT | |
| | AAGGTGTATGTCAGATATTCATATTGACCCAAATGTGTAATATTCCAGTTTTCTCTGCATAAGTAATTAA | |
| | AATATACTTAAAAATTAATAGTTTTATCTGGGTACAAATAAACAGGTGCCTGAACTAGTTCACAGACAAG | |
| | GAAACTTCTATGTAAAAATCACTATGATTTCTGAATTGCTATGTGAAACTACAGATCTTTGGAACACTGT | |
| | TTAGGTAGGGTGTTAAGACTTACACAGTACCTCGTTTCTACACAGAGAAAGAAATGGCCATACTTCAGGA | |
| | ACTGCAGTGCTTATGAGGGGATATTTAGGCCTCTTGAATTTTTGATGTAGATGGGCATTTTTTTAAGGTA | |
| | GTGGTTAATTACCTTTATGTGAACTTTGAATGGTTTAACAAAAGATTTGTTTTTGTAGAGATTTTAAAGG | |
| | GGGAGAATTCTAGAAATAAATGTTACCTAATTATTACAGCCTTAAAGACAAAAATCCTTGTTGAAGTTTT | |
| | TTTAAAAAAAGCTAAATTACATAGACTTAGGCATTAACATGTTTGTGGAAGAATATAGCAGACGTATATT | |
| | GTATCATTTGAGTGAATGTTCCCAAGTAGGCATTCTAGGCTCTATTTAACTGAGTCACACTGCATAGGAA | |
| | TTTAGAACCTAACTTTTATAGGTTATCAAAACTGTTGTCACCATTGCACAATTTTGTCCTAATATATACA | |
| | TAGAAACTTTGTGGGGCATGTTAAGTTACAGTTTGCACAAGTTCATCTCATTTGTATTCCATTGATTTTT | |
| | TTTTTCTTCTAAACATTTTTTCTTCAAACAGTATATAACTTTTTTTAGGGGATTTTTTTTTAGACAGCAA | |
| | AAACTATCTGAAGATTTCCATTTGTCAAAAAGTAATGATTTCTTGATAATTGTGTAGTAATGTTTTTTAG | |
| | AACCCAGCAGTTACCTTAAAGCTGAATTTATATTTAGTAACTTCTGTGTTAATACTGGATAGCATGAATT | |
| | CTGCATTGAGAAACTGAATAGCTGTCATAAAATGAAACTTTCTTTCTAAAGAAAGATACTCACATGAGTT | |
| | CTTGAAGAATAGTCATAACTAGATTAAGATCTGTGTTTTAGTTTAATAGTTTGAAGTGCCTGTTTGGGAT | |
| | AATGATAGGTAATTTAGATGAATTTAGGGGAAAAAAAAGTTATCTGCAGATATGTTGAGGGCCCATCTCT | |
| | CCCCCCACACCCCCACAGAGCTAACTGGGTTACAGTGTTTTATCCGAAAGTTTCCAATTCCACTGTCTTG | |
| | TGTTTTCATGTTGAAAATACTTTTGCATTTTTCCTTTGAGTGCCAATTTCTTACTAGTACTATTTCTTAA | |
| | TGTAACATGTTTACCTGGAATGTATTTTAACTATTTTTGTATAGTGTAAACTGAAACATGCACATTTTGT | |
| | ACATTGTGCTTTCTTTTGTGGGACATATGCAGTGTGATCCAGTTGTTTTCCATCATTTGGTTGCGCTGAC | |
| | CTAGGAATGTTGGTCATATCAAACATTAAAAATGACCACTCTTTTAATTGAAATTAACTTTTAAATGTTT | |
| | ATAGGAGTATGTGCTGTGAAGTGATCTAAAATTTGTAATATTTTTGTCATGAACTGTACTACTCCTAATT | |
| | ATTGTAATGTAATAAAAATAGTTACAGTGACAAAAAAAAAAAAAAA | |
| LRIG1 | GCGCTCCAGACAAGATGGCGCGGCCGGTCCGGGGAGGGCTCGGGGCCCCGCGCCGCTCGCCTTGCCTTCT | 56 |
| NM_015541.2 | CCTTCTCTGGCTGCTTTTGCTTCGGCTGGAGCCGGTGACCGCCGCGGCCGGCCCGCGGGCGCCCTGCGCG | |
| | GCCGCCTGCACTTGCGCTGGGGACTCGCTGGACTGCGGTGGGCGCGGGCTGGCTGCGTTGCCCGGGGACC | |
| | TGCCCTCCTGGACGCGGAGCCTAAACCTGAGTTACAACAAACTCTCTGAGATTGACCCTGCTGGTTTTGA | |
| | GGACTTGCCGAACCTACAGGAAGTGTACCTCAATAATAATGAGTTGACAGCGGTACCATCCCTGGGCGCT | |
| | GCTTCATCACATGTCGTCTCTCTCTTTCTGCAGCACAACAAGATTCGCAGCGTGGAGGGGAGCCAGCTGA | |
| | AGGCCTACCTTTCCTTAGAAGTGTTAGATCTGAGTTTGAACAACATCACGGAAGTGCGGAACACCTGCTT | |
| | TCCACACGGACCGCCTATAAAGGAGCTCAACCTGGCAGGCAATCGGATTGGCACCCTGGAGTTGGGAGCA | |
| | TTTGATGGTCTGTCACGGTCGCTGCTAACTCTTCGCCTGAGCAAAAACAGGATCACCCAGCTTCCTGTAA | |
| | GAGCATTCAAGCTACCCAGGCTGACACAACTGGACCTCAATCGGAACAGGATTCGGCTGATAGAGGGCCT | |
| | CACCTTCCAGGGGCTCAACAGCTTGGAGGTGCTGAAGCTTCAGCGAAACAACATCAGCAAACTGACAGAT | |
| | GGGGCCTTCTGGGGACTGTCCAAGATGCATGTGCTGCACCTGGAGTACAACAGCCTGGTAGAAGTGAACA | |
| | GCGGCTCGCTCTACGGCCTCACGGCCCTGCATCAGCTCCACCTCAGCAACAATTCCATCGCTCGCATTCA | |
| | CCGCAAGGGCTGGAGCTTCTGCCAGAAGCTGCATGAGTTGGTCCTGTCCTTCAACAACCTGACACGGCTG | |
| | GACGAGGAGAGCCTGGCCGAGCTGAGCAGCCTGAGTGTCCTGCGTCTCAGCCACAATTCCATCAGCCACA | |
| | TTGCGGAGGGTGCCTTCAAGGGACTCAGGAGCCTGCGAGTCTTGGATCTGGACCATAACGAGATTTCGGG | |
| | CACAATAGAGGACACGAGCGGCGCCTTCTCAGGGCTCGACAGCCTCAGCAAGCTGACTCTGTTTGGAAAC | |
| | AAGATCAAGTCTGTGGCTAAGAGAGCATTCTCGGGGCTGGAAGGCCTGGAGCACCTGAACCTTGGAGGGA | |
| | ATGCGATCAGATCTGTCCAGTTTGATGCCTTTGTGAAGATGAAGAATCTTAAAGAGCTCCATATCAGCAG | |
| | CGACAGCTTCCTGTGTGACTGCCAGCTGAAGTGGCTGCCCCCGTGGCTAATTGGCAGGATGCTGCAGGCC | |
| | TTTGTGACAGCCACCTGTGCCCACCCAGAATCACTGAAGGGTCAGAGCATTTTCTCTGTGCCACCAGAGA | |
| | GTTTCGTGTGCGATGACTTCCTGAAGCCACAGATCATCACCCAGCCAGAAACCACCATGGCTATGGTGGG | |
| | CAAGGACATCCGGTTTACATGCTCAGCAGCCAGCAGCAGCAGCTCCCCCATGACCTTTGCCTGGAAGAAA | |
| | GACAATGAAGTCCTGACCAATGCAGACATGGAGAACTTTGTCCACGTCCACGCGCAGGACGGGGAAGTGA | |
| | TGGAGTACACCACCATCCTGCACCTCCGTCAGGTCACTTTCGGGCACGAGGGCCGCTACCAATGTGTCAT | |
| | CACCAACCACTTTGGCTCCACCTATTCACATAAGGCCAGGCTCACCGTGAATGTGTTGCCATCATTCACC | |
| | AAAACGCCCCACGACATAACCATCCGGACCACCACCATGGCCCGCCTCGAATGTGCTGCCACAGGTCACC | |
| | CAAACCCTCAGATTGCCTGGCAGAAGGATGGAGGCACGGATTTCCCCGCTGCCCGTGAGCGACGCATGCA | |
| | TGTCATGCCGGATGACGACGTGTTTTTCATCACTGATGTGAAAATAGATGACGCAGGGGTTTACAGCTGT | |
| | ACTGCTCAGAACTCAGCCGGTTCTATTTCAGCTAATGCCACCCTGACTGTCCTAGAGACCCCATCCTTGG | |
| | TGGTCCCCTTGGAAGACCGTGTGGTATCTGTGGGAGAAACAGTGGCCCTCCAATGCAAAGCCACGGGGAA | |
| | CCCTCCGCCCCGCATCACCTGGTTCAAGGGGGACCGCCCGCTGAGCCTCACTGAGCGGCACCACTTGACC | |
| | CCTGACAACCAGCTCCTGGTGGTTCAGAACGTGGTGGCAGAGGATGCGGGCCGATATACCTGTGAGATGT | |
| | CCAACACCCTGGGCACGGAGCGAGCTCACAGCCAGCTGAGCGTCCTGCCCGCAGCAGGCTGCAGGAAGGA | |
| | TGGGACCACGGTAGGCATCTTCACCATTGCTGTCGTGAGCAGCATCGTCCTGACGTCACTGGTCTGGGTG | |
| | TGCATCATCTACCAGACCAGGAAGAAGAGTGAAGAGTACAGTGTCACCAACACAGATGAAACCGTCGTGC | |
| | CACCAGATGTTCCAAGCTACCTCTCTTCTCAGGGGACCCTTTCTGACCGACAAGAAACCGTGGTCAGGAC | |
| | CGAGGGTGGCCCTCAGGCCAATGGGCACATTGAGAGCAATGGTGTGTGTCCAAGAGATGCAAGCCACTTT | |
| | CCAGAGCCCGACACTCACAGCGTTGCCTGCAGGCAGCCAAAGCTCTGTGCTGGGTCTGCGTATCACAAAG | |
| | AGCCGTGGAAAGCGATGGAGAAAGCTGAAGGGACACCTGGGCCACATAAGATGGAACACGGTGGCCGGGT | |
| | CGTATGCAGTGACTGCAACACCGAAGTGGACTGTTACTCCAGGGGACAAGCCTTCCACCCCCAGCCTGTG | |
| | TCCAGAGACAGCGCACAGCCAAGTGCGCCAAATGGCCCGGAGCCGGGTGGGAGTGACCAAGAGCATTCTC | |
| | CACATCACCAGTGCAGCAGGACTGCCGCTGGGTCCTGCCCCGAGTGCCAAGGGTCGCTCTACCCCAGTAA | |
| | CCACGATAGAATGCTGACGGCTGTGAAGAAAAAGCCAATGGCATCTCTAGATGGGAAAGGGGATTCTTCC | |
| | TGGACTTTAGCAAGGTTGTATCACCCGGACTCCACAGAGCTACAGCCTGCATCTTCATTAACTTCAGGCA | |
| | GTCCAGAGCGCGCGGAAGCCCAGTACTTGCTTGTTTCCAATGGCCACCTCCCCAAAGCATGTGACGCCAG | |
| | TCCCGAGTCCACGCCACTGACAGGACAGCTCCCCGGGAAACAGAGGGTGCCACTGCTGTTGGCACCAAAA | |
| | AGCTAGGTTTTGTCTACCTCAGTTCTTGTCATACCAATCTCTACGGGAAAGAGAGGTAGGAGAGGCTGCG | |
| | AGGAAGCTTGGGTTCAAGCGTCACTCATCTGTACATAGTTGTAACTCCCATGTGGAGTATCAGTCGCTCA | |
| | CAGGACTTGGATCTGAAGCACAGTAAACGCAAGAGGGGATTTGTGTACAAAAGGCAAAAAAAGTATTTGA | |
| | TATCATTGTACATAAGAGTTTTCAGAGATTTCATATATATCTTTTACAGAGGCTATTTTAATCTTTAGTG | |
| | CATGGTTAACAGAAAAAAATTATACAATTTTGACAATATTATTTTTCGTATCAGGTTGCTGTTTAATTTT | |
| | GGAGGGGGTGGGGAAATAGTTCTGGTGCCTTAACGCATGGCTGGAATTTATAGAGGCTACAACCACATTT | |
| | GTTCACAGGAGTTTTTGGTGCGGGGTGGGAAGGATGGAAGGCCTTGGATTTATATTGCACTTCATAGACC | |
| | CCTAGGCTGCTGTGCGGTGGGACTCCACATGCGCCGGAAGGAGCTTCAGGTGAGCACTGCTCATGTGTGG | |
| | ATGCCCCTGCAACAGGCTTCCCTGTCTGTAGAGCCAGGGGTGCAAGTGCCATCCACACTTGCAGTGAATG | |
| | GCTTTTCCTTTTAGGTTTAAGTCCTGTCTGTCTGTAAGGCGTAGAATCTGTCCGTCTGTAAGGCGTAGAA | |
| | TGAGGGTTGTTAATCCATCACAAGCAAAAGGTCAGAACAGTTAAACACTGCCTTTCCTCCTCCTCTTATT | |
| | TTATGATAAAAGCAAATGTGGCCTTCTCAGTATCATTCGATTGCTATTTGAGACTTTTAAATTAAGGTAA | |
| | AGGCTGCTGGTGTTGGTACCTGTGGATTTTTCTATACTGATGTTTTCGTTTTGCCAATATAATGAGTATT | |
| | ACATTGGCCTTGGGGGACAGAAAGGAGGAAGTTCTGACTTTTCAGGGCTACCTTATTTCTACTAAGGACC | |
| | CAGAGCAGGCCTGTCCATGCCATTCCTTCGCACAGATGAAACTGAGCTGGGACTGGAAAGGACAGCCCTT | |
| | GACCTGGGTTCTGGGTATAATTTGCACTTTTGAGACTGGTAGCTAACCATCTTATGAGTGCCAATGTGTC | |
| | ATTTAGTAAAACTTAAATAGAAACAAGGTCCTTCAAATGTTCCTTTGGCCAAAAGCTGAAGGGAGTTACT | |
| | GAGAAAATAGTTAACAATTACTGTCAGGTGTCATCACTGTTCAAAAGGTAAGCACATTTAGAATTTTGTT | |
| | CTTGACAGTTAACTGACTAATCTTACTTCCACAAAATATGTGAATTTGCTGCTTCTGAGAGGCAATGTGA | |
| | AAGAGGGAGTATTACTTTTATGTACAAAGTTATTTATTTATAGAAATTTTGGTACAGTGTACATTGAAAA | |
| | CCATGTAAAATATTGAAGTGTCTAACAAATGGCATTGAAGTGTCTTTAATAAAGGTTCATTTATAAATGT | |
| | CAAAAAAAAAAAAAAAAAAAAAAAAAAAAAAAAAAAAAAAAAAAAAAAAAAA | |
| MAP2 | GGGATAATGCTCCCGGAGAAGGATTCTGCAGCAGTTCTCAAAGGCTAGACTTGAGTGGTATTGCTGCATA | 57 |
| NM_002374.3 | TGCGCTGATTCTTCAGCTTGTCTCTAACCGAGGAAGCATTGATTGGGAGCTACTCATTCAGAAAATTAAA | |
| | AGAAAGAAGCCAGAAAATATTATCAACCCTTTGAGAACACGACACAACGAACTTTATATTTTACCACTTC | |
| | CTTGAATAGTTGCAGGAGAAATAACAAGGCATTGAAGAATGGCAGATGAACGGAAAGATGAAGCAAAGGC | |
| | ACCTCACTGGACCTCAGCACCGCTAACAGAGGCATCTGCACACTCACATCCACCTGAGATTAAGGATCAA | |
| | GGCGGAGCAGGGGAAGGACTTGTCCGAAGCGCCAATGGATTCCCATACAGGGAGGATGAAGAGGGTGCCT | |
| | TTGGAGAGCATGGGTCACAGGGCACCTATTCAAATACCAAAGAGAATGGGATCAACGGAGAGCTGACCTC | |
| | AGCTGACAGAGAAACAGCAGAGGAGGTGTCTGCAAGGATAGTTCAAGTAGTCACTGCTGAGGCTGTAGCA | |
| | GTCCTGAAAGGTGAACAAGAGAAAGAAGCTCAACATAAAGACCAGACTGCAGCTCTGCCTTTAGCAGCTG | |
| | AAGAAACAGCTAATCTGCCTCCTTCTCCACCCCCATCACCTGCCTCAGAACAGACTGTCACAGTGGAGGA | |
| | AGATTTACTTACAGCCTCGAAGATGGAGTTCCACGATCAACAGGAATTGACTCCCTCTACAGCTGAGCCT | |
| | TCAGACCAGAAGGAAAAGGAGTCAGAGAAGCAAAGTAAGCCTGGTGAAGACCTTAAACATGCTGCCTTAG | |
| | TTTCTCAGCCAGAGACAACTAAAACTTACCCTGATAAAAAGGACATGCAAGGCACGGAAGAAGAAAAAGC | |
| | ACCCCTAGCTTTGTTTGGGCACACTCTTGTTGCCAGCCTGGAAGACATGAAACAGAAGACAGAACCAAGC | |
| | CTTGTAGTACCTGGCATTGACCTCCCTAAAGAGCCTCCAACTCCAAAAGAACAAAAGGACTGGTTCATCG | |
| | AAATGCCAACGGAAGCAAAAAAGGATGAGTGGGGTTTAGTTGCCCCCATATCTCCTGGCCCTCTGACTCC | |
| | CATGAGGGAAAAAGATGTATTTGATGATATCCCAAAATGGGAAGGGAAACAGTTTGATTCTCCCATGCCA | |
| | AGTCCCTTTCAAGGGGGAAGCTTCACTCTTCCTTTAGATGTCATGAAGAATGAAATAGTTACAGAAACAT | |
| | CGCCCTTTGCCCCTGCCTTTTTACAGCCAGATGACAAAAAATCTCTGCAACAAACCAGTGGCCCAGCTAC | |
| | TGCCAAAGATAGTTTTAAAATTGAAGAGCCCCATGAGGCTAAACCTGACAAAATGGCAGAAGCACCACCC | |
| | TCAGAGGCAATGACCTTACCCAAAGATGCTCACATTCCAGTTGTAGAAGAACATGTTATGGGGAAAGTTT | |
| | TAGAGGAAGAAAAGGAGGCCATAAATCAAGAGACTGTGCAGCAAAGGGATACTTTCACCCCCAGTGGACA | |
| | GGAACCTATACTTACTGAAAAGGAAACTGAGCTGAAGCTTGAAGAAAAAACCACCATTTCTGACAAAGAA | |
| | GCTGTGCCAAAAGAGAGTAAACCCCCAAAACCTGCAGATGAAGAAATAGGCATAATTCAGACCTCCACAG | |
| | AGCACACTTTCTCAGAACAGAAAGACCAAGAGCCTACCACAGATATGTTGAAACAGGACTCGTTCCCTGT | |
| | AAGTTTGGAGCAAGCAGTTACAGATTCAGCCATGACCTCTAAAACACTGGAGAAAGCCATGACCGAACCA | |
| | TCTGCATTAATTGAAAAGAGCTCAATTCAGGAACTTTTTGAAATGAGAGTTGATGACAAAGATAAGATTG | |
| | AAGGAGTTGGAGCTGCAACATCAGCTGAGCTTGATATGCCATTTTATGAAGATAAATCAGGAATGTCCAA | |
| | GTACTTTGAAACATCTGCCTTGAAAGAAGAAGCAACAAAAAGCATTGAGCCAGGCAGTGATTACTATGAA | |
| | CTGAGTGACACTAGAGAAAGTGTCCATGAGTCTATTGATACCATGTCTCCCATGCATAAAAATGGTGACA | |
| | AGGAGTTTCAAACAGGAAAAGAATCCCAGCCCAGTCCTCCAGCACAAGAAGCAGGGTACAGCACTCTCGC | |
| | ACAGAGTTATCCATCAGATTTACCTGAAGAACCCAGTTCTCCTCAAGAAAGAATGTTCACTATTGATCCA | |
| | AAAGTGTATGGAGAGAAAAGGGACCTCCACAGTAAGAATAAGGATGATTTGACCCTTAGCAGGAGTTTAG | |
| | GACTTGGTGGTAGGTCTGCAATAGAACAAAGAAGCATGTCAATCAATTTGCCGATGTCTTGCCTAGATTC | |
| | CATAGCCCTTGGATTTAACTTTGGTCGGGGACATGATCTTTCTCCTCTGGCTTCCGATATTCTAACCAAC | |
| | ACTAGTGGAAGTATGGATGAAGGGGATGATTACCTTCCAGCCACCACACCTGCACTGGAGAAAGCCCCTT | |
| | GCTTCCCTGTAGAAAGCAAAGAGGAAGAACAGATAGAGAAAGTAAAAGCTACTGGAGAAGAAAGTACTCA | |
| | AGCGGAGATATCATGTGAGTCTCCTTTCCTAGCCAAAGATTTTTACAAAAATGGTACTGTCATGGCACCT | |
| | GACCTTCCTGAAATGCTAGATCTGGCAGGCACAAGGTCAAGATTGGCTTCTGTGAGTGCAGATGCTGAGG | |
| | TTGCCAGGAGGAAATCAGTCCCATCAGAGACTGTGGTTGAGGATAGTCGTACTGGCTTGCCCCCGGTAAC | |
| | TGATGAAAACCATGTCATTGTAAAAACGGACAGTCAGCTCGAAGACCTGGGCTACTGTGTGTTCAATAAG | |
| | TACACAGTCCCATTGCCATCACCTGTTCAAGACAGTGAGAATTTATCAGGGGAGAGTGGTACCTTTTACG | |
| | AAGGCACTGATGATAAAGTTCGAAGAGATTTGGCCACAGACCTTTCACTGATTGAAGTGAAACTGGCAGC | |
| | AGCCGGAAGAGTCAAAGATGAGTTCAGTGTTGACAAAGAAGCATCCGCGCATATCTCTGGTGACAAATCA | |
| | GGACTGAGTAAGGAGTTTGACCAAGAGAAGAAAGCTAATGATAGGTTGGATACTGTACTAGAAAAGAGTG | |
| | AAGAACATGCTGATTCAAAAGAACATGCCAAGAAAACTGAAGAGGCTGGTGATGAAATAGAAACATTCGG | |
| | ATTAGGAGTAACCTATGAGCAAGCTTTGGCCAAAGATTTGTCAATACCAACAGATGCATCCTCTGAGAAA | |
| | GCAGAGAAGGGTCTTAGTTCAGTGCCAGAGATAGCTGAGGTAGAACCATCCAAAAAGGTGGAACAAGGTC | |
| | TGGATTTTGCTGTCCAGGGTCAACTAGATGTTAAAATTAGTGACTTTGGACAGATGGCTTCAGGGCTAAA | |
| | CATAGATGATAGAAGGGCAACAGAGCTAAAACTTGAGGCTACACAGGACATGACCCCCTCATCCAAAGCA | |
| | CCGCAGGAGGCAGATGCATTTATGGGTGTTGAGTCTGGCCACATGAAAGAAGGCACTAAAGTTAGTGAGA | |
| | CAGAAGTCAAAGAGAAGGTGGCCAAGCCTGACTTGGTGCACCAGGAGGCTGTAGACAAGGAGGAGTCCTA | |
| | TGAATCTAGTGGTGAGCATGAAAGTCTCACCATGGAGTCCTTGAAAGCTGATGAGGGCAAGAAGGAAACA | |
| | TCTCCAGAATCATCTCTAATTCAAGATGAGATTGCCGTCAAATTGTCAGTGGAAATACCTTGCCCACCTG | |
| | CTGTTTCAGAGGCTGATTTAGCCACAGATGAGAGAGCTGATGTCCAGATGGAATTTATTCAGGGGCCAAA | |
| | AGAAGAAAGCAAAGAGACCCCAGATATATCCATCACGCCTTCTGATGTTGCAGAGCCATTGCATGAAACG | |
| | ATCGTATCTGAACCAGCAGAGATTCAGAGTGAGGAAGAAGAGATAGAAGCCCAGGGAGAATATGATAAAC | |
| | TGCTCTTCCGCTCAGACACCCTTCAGATAACTGACCTGGGTGTCTCAGGTGCCAGGGAGGAATTTGTGGA | |
| | GACCTGCCCAAGTGAACACAAAGGAGTGATTGAGTCTGTTGTGACCATCGAGGATGATTTCATCACTGTA | |
| | GTGCAAACCACAACTGATGAAGGGGAGTCAGGGTCCCACAGCGTGCGTTTTGCAGCCCTAGAGCAGCCTG | |
| | AGGTGGAAAGGAGACCATCTCCTCATGATGAAGAAGAGTTTGAAGTAGAAGAGGCAGCTGAAGCCCAGGC | |
| | AGAACCCAAAGATGGTTCCCCAGAGGCTCCAGCTTCCCCTGAGAGAGAAGAGGTTGCACTTTCTGAATAT | |
| | AAGACAGAAACCTATGACGATTACAAAGATGAGACCACCATTGACGACTCCATCATGGACGCTGACAGCC | |
| | TCTGGGTGGACACTCAAGATGATGATAGGAGCATCATGACAGAACAGTTAGAAACTATTCCTAAAGAGGA | |
| | GAAAGCTGAAAAGGAAGCTCGGAGATCATCTCTTGAGAAACATAGAAAAGAAAAGCCTTTTAAAACCGGG | |
| | AGAGGCAGAATTTCCACTCCTGAAAGAAAAGTAGCTAAAAAGGAACCTAGCACAGTCTCCAGAGATGAAG | |
| | TGAGAAGGAAAAAAGCAGTTTATAAGAAGGCTGAACTTGCTAAAAAAACAGAAGTTCAGGCCCACTCTCC | |
| | CTCCAGGAAATTCATTTTAAAACCTGCTATCAAATATACTAGACCAACTCATCTCTCCTGTGTTAAGCGG | |
| | AAAACCACAGCAGCAGGTGGGGAATCAGCTCTGGCTCCCAGTGTATTTAAACAGGCAAAGGACAAAGTCT | |
| | CTGACGGAGTAACCAAGAGCCCAGAAAAGCGCTCTTCTCTCCCAAGACCTTCCTCCATTCTCCCTCCTCG | |
| | GCGAGGTGTGTCAGGAGACAGAGATGAGAATTCCTTCTCTCTCAACAGTTCTATCTCTTCTTCAGCACGG | |
| | CGGACCACCAGGTCAGAGCCAATTCGCAGAGCAGGGAAGAGTGGTACCTCAACACCCACTACCCCTGGGT | |
| | CTACTGCCATCACTCCTGGCACCCCACCAAGTTATTCTTCACGCACACCAGGCACTCCTGGAACCCCTAG | |
| | CTATCCCAGGACCCCTCACACACCAGGAACCCCCAAGTCTGCCATCTTGGTGCCGAGTGAGAAGAAGGTC | |
| | GCCATCATACGTACTCCTCCAAAATCTCCTGCGACTCCCAAGCAGCTTCGGCTTATTAACCAACCACTGC | |
| | CAGACCTGAAGAATGTCAAATCCAAAATCGGATCAACAGACAACATCAAATACCAGCCTAAAGGGGGGCA | |
| | GGTACAAATTGTTACCAAGAAAATAGACCTAAGCCATGTGACATCCAAATGTGGCTCTCTGAAGAACATC | |
| | CGCCACAGGCCAGGTGGCGGACGTGTGAAAATTGAGAGTGTAAAACTAGATTTCAAAGAAAAGGCCCAAG | |
| | CTAAAGTTGGTTCTCTTGATAATGCTCATCATGTACCTGGAGGTGGTAATGTCAAGATTGACAGCCAAAA | |
| | GTTGAACTTCAGAGAGCATGCTAAAGCCCGTGTGGACCATGGGGCTGAGATCATTACACAGTCCCCAGGC | |
| | AGATCCAGCGTGGCATCACCCCGACGACTCAGCAATGTCTCCTCGTCTGGAAGCATCAACCTGCTCGAAT | |
| | CTCCTCAGCTTGCCACTTTGGCTGAGGATGTCACTGCTGCACTCGCTAAGCAGGGCTTGTGAATATTTCT | |
| | CATTTAGCATTGAAATAATAATATTTAGGCATGAGCTCTTGGCAGGAGTGGGCTCTGAGCAGTTGTTATA | |
| | TTCATTCTTTATAAACCATAAAATAAATAATCTCATCCCCAAACTGTAGTAATTGTTACAATTTTCTATT | |
| | TAAAAAATGAATAGTACATGCAGAAATTGACCTGATTTCCATTTGCAACAGGAAGACACTGGCTTTACAT | |
| | GGGTTCAATTGGACAATTATTTTTGCTCTGCTCTGTTTTGCATGGAGTATTATTATTTTAAAAATTGCAT | |
| | TTTTACCTTTCATGTGCCTGAAGGCTATCCACTACATTCTGAAGGCCTTGTTAAAATCCAAGCTGCTCAT | |
| | TTCACTATTCTGTTTCTGAGTGAGAAGATAAAAACTGCCCATTGTAACTTATTTCAGGTTAAATTAAACC | |
| | AAGGAGTCTGATTGCAGGAAGGGAAGAGCATGTAAGAAATAAGTTTTTTTAAAGTGTTATTTTGTATAAA | |
| | TGGGAAGAAAGATTCAATTAAGTTATTAACATTTGGGACCTGGATAATTATATCAGAGTATGTCAGTCCA | |
| | ATAAATTATTTAACTAATTAAAAAATAGTTGCAAAGCATTTGAGCTGTGGTTGAGGAAGTGGTGTAAAAG | |
| | TGCATCCATTAGGAATGATGCACTTTCATTAGGATGGACTCGTGTCTGATTAGAATGTCAGTTGATCAGC | |
| | TAGATTTGTGTCCACACTACCAGTTTCACACCCCCTTTCCATCTGTTTGATACAGTATTATAGATATAAA | |
| | TATATATATATTTCTCTGTGGCCATTTGTGATACTTCCTCATATACTTGAATATTATACTTCTTTATTCA | |
| | CAGTATCTGTGTCTCCTGCACCCTTTGGTGTTGCAATTTTAGATATGTGAAAGTAGATGTTAGCAGGGTT | |
| | CTCTCCCTATTTAAAAAAAATACATTAAAAAAGACAAAAAATTTTAGCATGAAGTTGCTTTCTGTAACAA | |
| | CTCAAAGCCGTAACCCTGTTTTAGTGCCAGATACAAGTCTCTCCCGTGATGCTAGACAAAAAATTATTTT | |
| | TCTTTGCTTTCACCAACATGGAGTTTGTGGGGGTGGGTCCAGTTATACATGAAAGGGTTTACAGATTGTT | |
| | GGTTTAAGATTATGGATTTATCTCATTTTTAATCACAGGATAGTTTGGGGTTTATTCCTATTATTATTCA | |
| | TGAAACCGACTTAAGATTTTTTCTTTATTTTTCTTTTTTTTTCCATTTGCTAAAGTTGAAAGTTGAAACT | |
| | AACTATAATAGTTTGAAACATGTTTTCTCATTTTTCCAAATAGTATCTGTTTATTAAATTCTCTAATAGA | |
| | AGATGTTTGTCTTTCTTACCCAAAGTAAAGATCCCCTGATCAGAAAGAAAAAATACAATACTTTGGGAAG | |
| | CTATAGCTATAAAACACTTGAGACACAGATATCTAAATCAGTTTTTTTCCAAGACTCCAACATTGCACTC | |
| | TGTAAAGTAACACACTGTGATCTAGTATTATTTATCAGTAGATAATACTGTTCTGACTGTATATACAGTC | |
| | TAGAACTCACAAATCAATTAGTTCCTCTCACAAATCATTCATCTTAGACTTACAAATAAGGAATGAAATA | |
| | GTCAATGGCCTGATTAAGGCAAAGAGCTACCAGGCTAGATGGACACTTTTTAAAAATTTTATCTGTTCTT | |
| | TTTCTTGCTCAGGGCTGGTAGGTTGGATCTGAACCATTAAAATCAAATGGTCCACTAGGCGTATGATCTC | |
| | TTTGAGCCAAATCAGTTCCTGAATATAAAGGAGGAAATGATGAGGATGTACTGAGGCAACGGGGAAGTAT | |
| | AGAAACATCCAAGACAAAAGCCAAGGGATGCAAAGGCAGAGACACAGGTGCTTTTTGGTGACCCAGTGGA | |
| | TATGGCAACCAGTGTAACTGCCATACAAGAAACCCTAGGAGCAAACCCACACCACTCATTCTCAGCTAAG | |
| | AGATTTTACACAGGCAAACGTGTCTTAAACCATCTATAAATCAGTTATTTTATATGACAGTCAAAACCTT | |
| | AGAAACCTTAGGATCATTATATCTATTTTCTGCCTATTAATTGCTGTGAGGTTTGATTTGACCAATCTGG | |
| | GCAATTTATTCATCAGCTTCCCTTGAAGTGCACCAGAAAATAGAAGAAAGGTGTGTGGAGACTTAGGGTA | |
| | TTTTATTACATGTTTTCATAGTCTTAAATAGTGATTAAATTTCTCTAGAAAGAAGTTAACAGCTCATTAG | |
| | AAAAGTTTTAACCTGTGAAATAAGTATTTTTCTCAACATTCTTTAAAGTTTTTATATAAGTTAACACTAG | |
| | GTAAACATTCTGCATACTAGAAGTCAGTTTATTACAAATACATGTCAAAAATAAAGATTATACAAGGCAC | |
| | CAAACTACTAGATTTGGCATTAAAACAAATGTTTATTTCTAATCACAACAAAATTATAATGAATAAATGT | |
| | TCTTGCTTTGTATGGAAATACAATTCTTTATTAAAGTTAACAGAAAGGAACTGATCGTTTGTACCAGTAA | |
| | AAGAGAGAAACACACAGGTTAAATATCTTCTTGTGGGGTTAAGGGGTAGAACCTATCTTGCCTTCACTCT | |
| | CAAGATAACGACTCAAATTAAGCTTTTTGAGCACCACTCTTGTGGGGACACACATACGCTGATCTAGGAA | |
| | TGAAATCTTCGTGGTCTCAATTCTAGATCTACTATGCCAGTTTCTCTCTGGCTTTAGCCTTTGAGAACCT | |
| | GTATAAGAATACGTAAGTAATCCAGAGCTGTGAAGAGTTTAAAGGCCAACTTCTCCAGTGAACTCAACCT | |
| | CTGGGTCACTTGCAACCAGAAATTGGATACCTCATAATGATGCAGGAAAGACCCGAGTTCATGATGAGTT | |
| | TCAAAGGCCACGTTCATTTAGGAACCAACTCTCTCTGGATTTACCTGCTGAGTTCCAGCAGCGTGATGGG | |
| | CTGACATCCCACCTACAAGTATGACACCTGTGTAACACCAGCTAGGTACGGCTGGAGAAGGCTGAAGAGA | |
| | GAATGCCATTAAATGGAAGAATGTACTGATTGTAGTGACCTTCTCCACACACACACACACACACACACAC | |
| | ACACACACCTACAGTAATACAGCAAGCGTGGAATAATCAGCCAATATATAACATTCCATCAGTATTTTAT | |
| | TAAGGAAATAACCTGAATGTGGTTGATTTTGACATAGCTGCAATTACAGTTTTCTTCTATTTTTCAAGCC | |
| | ACAATAAGGAAAATAAACTACTCATGGTCTAAATACTAGAGATAAAGTAGATTCATGGCTTGGTAAGGAA | |
| | ATTTTAAGCATTCCTTCAAAGATTGACGTGCTAAAATAAGCATTGATGTTTTGAGTTTTTTTACACCTAG | |
| | GATTTTTAGCTTGGGTGTGTAGGTGAAGGCCAAGACTCTCTGCAGGAAAAAGCTTATTTTCAAACTCAGA | |
| | AAATAAAATGTCAATCATAAAAATCTACTTCAACTTTAGCAAAAAGAAAAAAAAATCAACAAAAAGTATA | |
| | CTCTGTATGCTGGGATTCCGAGGTTCCAACACACTGTTACAAATCTGTGGGGGGTTTCTTTCTTCTGATA | |
| | ATTCTAGAGCCTGTTACCATAGAAAGGCATTTCTTCAATGGCTGGTTGTAGTTAGTTCATGTTTTTCAAT | |
| | CAAATTTGCAAATGTATTTGTTGCTGTATAGTGATTGTTTTGCAAAATAAAATTGCTTGTCACCT | |
| MAPT | GGACGGCCGAGCGGCAGGGCGCTCGCGCGCGCCCACTAGTGGCCGGAGGAGAAGGCTCCCGCGGAGGCCG | 58 |
| NM_016835.4 | CGCTGCCCGCCCCCTCCCCTGGGGAGGCTCGCGTTCCCGCTGCTCGCGCCTGCGCCGCCCGCCGGCCTCA | |
| | GGAACGCGCCCTCTTCGCCGGCGCGCGCCCTCGCAGTCACCGCCACCCACCAGCTCCGGCACCAACAGCA | |
| | GCGCCGCTGCCACCGCCCACCTTCTGCCGCCGCCACCACAGCCACCTTCTCCTCCTCCGCTGTCCTCTCC | |
| | CGTCCTCGCCTCTGTCGACTATCAGGTGAACTTTGAACCAGGATGGCTGAGCCCCGCCAGGAGTTCGAAG | |
| | TGATGGAAGATCACGCTGGGACGTACGGGTTGGGGGACAGGAAAGATCAGGGGGGCTACACCATGCACCA | |
| | AGACCAAGAGGGTGACACGGACGCTGGCCTGAAAGAATCTCCCCTGCAGACCCCCACTGAGGACGGATCT | |
| | GAGGAACCGGGCTCTGAAACCTCTGATGCTAAGAGCACTCCAACAGCGGAAGATGTGACAGCACCCTTAG | |
| | TGGATGAGGGAGCTCCCGGCAAGCAGGCTGCCGCGCAGCCCCACACGGAGATCCCAGAAGGAACCACAGC | |
| | TGAAGAAGCAGGCATTGGAGACACCCCCAGCCTGGAAGACGAAGCTGCTGGTCACGTGACCCAAGAGCCT | |
| | GAAAGTGGTAAGGTGGTCCAGGAAGGCTTCCTCCGAGAGCCAGGCCCCCCAGGTCTGAGCCACCAGCTCA | |
| | TGTCCGGCATGCCTGGGGCTCCCCTCCTGCCTGAGGGCCCCAGAGAGGCCACACGCCAACCTTCGGGGAC | |
| | AGGACCTGAGGACACAGAGGGCGGCCGCCACGCCCCTGAGCTGCTCAAGCACCAGCTTCTAGGAGACCTG | |
| | CACCAGGAGGGGCCGCCGCTGAAGGGGGCAGGGGGCAAAGAGAGGCCGGGGAGCAAGGAGGAGGTGGATG | |
| | AAGACCGCGACGTCGATGAGTCCTCCCCCCAAGACTCCCCTCCCTCCAAGGCCTCCCCAGCCCAAGATGG | |
| | GCGGCCTCCCCAGACAGCCGCCAGAGAAGCCACCAGCATCCCAGGCTTCCCAGCGGAGGGTGCCATCCCC | |
| | CTCCCTGTGGATTTCCTCTCCAAAGTTTCCACAGAGATCCCAGCCTCAGAGCCCGACGGGCCCAGTGTAG | |
| | GGCGGGCCAAAGGGCAGGATGCCCCCCTGGAGTTCACGTTTCACGTGGAAATCACACCCAACGTGCAGAA | |
| | GGAGCAGGCGCACTCGGAGGAGCATTTGGGAAGGGCTGCATTTCCAGGGGCCCCTGGAGAGGGGCCAGAG | |
| | GCCCGGGGCCCCTCTTTGGGAGAGGACACAAAAGAGGCTGACCTTCCAGAGCCCTCTGAAAAGCAGCCTG | |
| | CTGCTGCTCCGCGGGGGAAGCCCGTCAGCCGGGTCCCTCAACTCAAAGCTCGCATGGTCAGTAAAAGCAA | |
| | AGACGGGACTGGAAGCGATGACAAAAAAGCCAAGACATCCACACGTTCCTCTGCTAAAACCTTGAAAAAT | |
| | AGGCCTTGCCTTAGCCCCAAACACCCCACTCCTGGTAGCTCAGACCCTCTGATCCAACCCTCCAGCCCTG | |
| | CTGTGTGCCCAGAGCCACCTTCCTCTCCTAAATACGTCTCTTCTGTCACTTCCCGAACTGGCAGTTCTGG | |
| | AGCAAAGGAGATGAAACTCAAGGGGGCTGATGGTAAAACGAAGATCGCCACACCGCGGGGAGCAGCCCCT | |
| | CCAGGCCAGAAGGGCCAGGCCAACGCCACCAGGATTCCAGCAAAAACCCCGCCCGCTCCAAAGACACCAC | |
| | CCAGCTCTGGTGAACCTCCAAAATCAGGGGATCGCAGCGGCTACAGCAGCCCCGGCTCCCCAGGCACTCC | |
| | CGGCAGCCGCTCCCGCACCCCGTCCCTTCCAACCCCACCCACCCGGGAGCCCAAGAAGGTGGCAGTGGTC | |
| | CGTACTCCACCCAAGTCGCCGTCTTCCGCCAAGAGCCGCCTGCAGACAGCCCCCGTGCCCATGCCAGACC | |
| | TGAAGAATGTCAAGTCCAAGATCGGCTCCACTGAGAACCTGAAGCACCAGCCGGGAGGCGGGAAGGTGCA | |
| | GATAATTAATAAGAAGCTGGATCTTAGCAACGTCCAGTCCAAGTGTGGCTCAAAGGATAATATCAAACAC | |
| | GTCCCGGGAGGCGGCAGTGTGCAAATAGTCTACAAACCAGTTGACCTGAGCAAGGTGACCTCCAAGTGTG | |
| | GCTCATTAGGCAACATCCATCATAAACCAGGAGGTGGCCAGGTGGAAGTAAAATCTGAGAAGCTTGACTT | |
| | CAAGGACAGAGTCCAGTCGAAGATTGGGTCCCTGGACAATATCACCCACGTCCCTGGCGGAGGAAATAAA | |
| | AAGATTGAAACCCACAAGCTGACCTTCCGCGAGAACGCCAAAGCCAAGACAGACCACGGGGCGGAGATCG | |
| | TGTACAAGTCGCCAGTGGTGTCTGGGGACACGTCTCCACGGCATCTCAGCAATGTCTCCTCCACCGGCAG | |
| | CATCGACATGGTAGACTCGCCCCAGCTCGCCACGCTAGCTGACGAGGTGTCTGCCTCCCTGGCCAAGCAG | |
| | GGTTTGTGATCAGGCCCCTGGGGCGGTCAATAATTGTGGAGAGGAGAGAATGAGAGAGTGTGGAAAAAAA | |
| | AAGAATAATGACCCGGCCCCCGCCCTCTGCCCCCAGCTGCTCCTCGCAGTTCGGTTAATTGGTTAATCAC | |
| | TTAACCTGCTTTTGTCACTCGGCTTTGGCTCGGGACTTCAAAATCAGTGATGGGAGTAAGAGCAAATTTC | |
| | ATCTTTCCAAATTGATGGGTGGGCTAGTAATAAAATATTTAAAAAAAAACATTCAAAAACATGGCCACAT | |
| | CCAACATTTCCTCAGGCAATTCCTTTTGATTCTTTTTTCTTCCCCCTCCATGTAGAAGAGGGAGAAGGAG | |
| | AGGCTCTGAAAGCTGCTTCTGGGGGATTTCAAGGGACTGGGGGTGCCAACCACCTCTGGCCCTGTTGTGG | |
| | GGGTGTCACAGAGGCAGTGGCAGCAACAAAGGATTTGAAACTTGGTGTGTTCGTGGAGCCACAGGCAGAC | |
| | GATGTCAACCTTGTGTGAGTGTGACGGGGGTTGGGGTGGGGCGGGAGGCCACGGGGGAGGCCGAGGCAGG | |
| | GGCTGGGCAGAGGGGAGAGGAAGCACAAGAAGTGGGAGTGGGAGAGGAAGCCACGTGCTGGAGAGTAGAC | |
| | ATCCCCCTCCTTGCCGCTGGGAGAGCCAAGGCCTATGCCACCTGCAGCGTCTGAGCGGCCGCCTGTCCTT | |
| | GGTGGCCGGGGGTGGGGGCCTGCTGTGGGTCAGTGTGCCACCCTCTGCAGGGCAGCCTGTGGGAGAAGGG | |
| | ACAGCGGGTAAAAAGAGAAGGCAAGCTGGCAGGAGGGTGGCACTTCGTGGATGACCTCCTTAGAAAAGAC | |
| | TGACCTTGATGTCTTGAGAGCGCTGGCCTCTTCCTCCCTCCCTGCAGGGTAGGGGGCCTGAGTTGAGGGG | |
| | CTTCCCTCTGCTCCACAGAAACCCTGTTTTATTGAGTTCTGAAGGTTGGAACTGCTGCCATGATTTTGGC | |
| | CACTTTGCAGACCTGGGACTTTAGGGCTAACCAGTTCTCTTTGTAAGGACTTGTGCCTCTTGGGAGACGT | |
| | CCACCCGTTTCCAAGCCTGGGCCACTGGCATCTCTGGAGTGTGTGGGGGTCTGGGAGGCAGGTCCCGAGC | |
| | CCCCTGTCCTTCCCACGGCCACTGCAGTCACCCCGTCTGCGCCGCTGTGCTGTTGTCTGCCGTGAGAGCC | |
| | CAATCACTGCCTATACCCCTCATCACACGTCACAATGTCCCGAATTCCCAGCCTCACCACCCCTTCTCAG | |
| | TAATGACCCTGGTTGGTTGCAGGAGGTACCTACTCCATACTGAGGGTGAAATTAAGGGAAGGCAAAGTCC | |
| | AGGCACAAGAGTGGGACCCCAGCCTCTCACTCTCAGTTCCACTCATCCAACTGGGACCCTCACCACGAAT | |
| | CTCATGATCTGATTCGGTTCCCTGTCTCCTCCTCCCGTCACAGATGTGAGCCAGGGCACTGCTCAGCTGT | |
| | GACCCTAGGTGTTTCTGCCTTGTTGACATGGAGAGAGCCCTTTCCCCTGAGAAGGCCTGGCCCCTTCCTG | |
| | TGCTGAGCCCACAGCAGCAGGCTGGGTGTCTTGGTTGTCAGTGGTGGCACCAGGATGGAAGGGCAAGGCA | |
| | CCCAGGGCAGGCCCACAGTCCCGCTGTCCCCCACTTGCACCCTAGCTTGTAGCTGCCAACCTCCCAGACA | |
| | GCCCAGCCCGCTGCTCAGCTCCACATGCATAGTATCAGCCCTCCACACCCGACAAAGGGGAACACACCCC | |
| | CTTGGAAATGGTTCTTTTCCCCCAGTCCCAGCTGGAAGCCATGCTGTCTGTTCTGCTGGAGCAGCTGAAC | |
| | ATATACATAGATGTTGCCCTGCCCTCCCCATCTGCACCCTGTTGAGTTGTAGTTGGATTTGTCTGTTTAT | |
| | GCTTGGATTCACCAGAGTGACTATGATAGTGAAAAGAAAAAAAAAAAAAAAAAAGGACGCATGTATCTTG | |
| | AAATGCTTGTAAAGAGGTTTCTAACCCACCCTCACGAGGTGTCTCTCACCCCCACACTGGGACTCGTGTG | |
| | GCCTGTGTGGTGCCACCCTGCTGGGGCCTCCCAAGTTTTGAAAGGCTTTCCTCAGCACCTGGGACCCAAC | |
| | AGAGACCAGCTTCTAGCAGCTAAGGAGGCCGTTCAGCTGTGACGAAGGCCTGAAGCACAGGATTAGGACT | |
| | GAAGCGATGATGTCCCCTTCCCTACTTCCCCTTGGGGCTCCCTGTGTCAGGGCACAGACTAGGTCTTGTG | |
| | GCTGGTCTGGCTTGCGGCGCGAGGATGGTTCTCTCTGGTCATAGCCCGAAGTCTCATGGCAGTCCCAAAG | |
| | GAGGCTTACAACTCCTGCATCACAAGAAAAAGGAAGCCACTGCCAGCTGGGGGGATCTGCAGCTCCCAGA | |
| | AGCTCCGTGAGCCTCAGCCACCCCTCAGACTGGGTTCCTCTCCAAGCTCGCCCTCTGGAGGGGCAGCGCA | |
| | GCCTCCCACCAAGGGCCCTGCGACCACAGCAGGGATTGGGATGAATTGCCTGTCCTGGATCTGCTCTAGA | |
| | GGCCCAAGCTGCCTGCCTGAGGAAGGATGACTTGACAAGTCAGGAGACACTGTTCCCAAAGCCTTGACCA | |
| | GAGCACCTCAGCCCGCTGACCTTGCACAAACTCCATCTGCTGCCATGAGAAAAGGGAAGCCGCCTTTGCA | |
| | AAACATTGCTGCCTAAAGAAACTCAGCAGCCTCAGGCCCAATTCTGCCACTTCTGGTTTGGGTACAGTTA | |
| | AAGGCAACCCTGAGGGACTTGGCAGTAGAAATCCAGGGCCTCCCCTGGGGCTGGCAGCTTCGTGTGCAGC | |
| | TAGAGCTTTACCTGAAAGGAAGTCTCTGGGCCCAGAACTCTCCACCAAGAGCCTCCCTGCCGTTCGCTGA | |
| | GTCCCAGCAATTCTCCTAAGTTGAAGGGATCTGAGAAGGAGAAGGAAATGTGGGGTAGATTTGGTGGTGG | |
| | TTAGAGATATGCCCCCCTCATTACTGCCAACAGTTTCGGCTGCATTTCTTCACGCACCTCGGTTCCTCTT | |
| | CCTGAAGTTCTTGTGCCCTGCTCTTCAGCACCATGGGCCTTCTTATACGGAAGGCTCTGGGATCTCCCCC | |
| | TTGTGGGGCAGGCTCTTGGGGCCAGCCTAAGATCATGGTTTAGGGTGATCAGTGCTGGCAGATAAATTGA | |
| | AAAGGCACGCTGGCTTGTGATCTTAAATGAGGACAATCCCCCCAGGGCTGGGCACTCCTCCCCTCCCCTC | |
| | ACTTCTCCCACCTGCAGAGCCAGTGTCCTTGGGTGGGCTAGATAGGATATACTGTATGCCGGCTCCTTCA | |
| | AGCTGCTGACTCACTTTATCAATAGTTCCATTTAAATTGACTTCAGTGGTGAGACTGTATCCTGTTTGCT | |
| | ATTGCTTGTTGTGCTATGGGGGGAGGGGGGAGGAATGTGTAAGATAGTTAACATGGGCAAAGGGAGATCT | |
| | TGGGGTGCAGCACTTAAACTGCCTCGTAACCCTTTTCATGATTTCAACCACATTTGCTAGAGGGAGGGAG | |
| | CAGCCACGGAGTTAGAGGCCCTTGGGGTTTCTCTTTTCCACTGACAGGCTTTCCCAGGCAGCTGGCTAGT | |
| | TCATTCCCTCCCCAGCCAGGTGCAGGCGTAGGAATATGGACATCTGGTTGCTTTGGCCTGCTGCCCTCTT | |
| | TCAGGGGTCCTAAGCCCACAATCATGCCTCCCTAAGACCTTGGCATCCTTCCCTCTAAGCCGTTGGCACC | |
| | TCTGTGCCACCTCTCACACTGGCTCCAGACACACAGCCTGTGCTTTTGGAGCTGAGATCACTCGCTTCAC | |
| | CCTCCTCATCTTTGTTCTCCAAGTAAAGCCACGAGGTCGGGGCGAGGGCAGAGGTGATCACCTGCGTGTC | |
| | CCATCTACAGACCTGCAGCTTCATAAAACTTCTGATTTCTCTTCAGCTTTGAAAAGGGTTACCCTGGGCA | |
| | CTGGCCTAGAGCCTCACCTCCTAATAGACTTAGCCCCATGAGTTTGCCATGTTGAGCAGGACTATTTCTG | |
| | GCACTTGCAAGTCCCATGATTTCTTCGGTAATTCTGAGGGTGGGGGGAGGGACATGAAATCATCTTAGCT | |
| | TAGCTTTCTGTCTGTGAATGTCTATATAGTGTATTGTGTGTTTTAACAAATGATTTACACTGACTGTTGC | |
| | TGTAAAAGTGAATTTGGAAATAAAGTTATTACTCTGATTAAA | |
| PPMID | GGGGAAGCGCAGTGCGCAGGCGCAACTGCCTGGCTCTGCTCGCTCCGGCGCTCCGGCCCAGCTCTCGCGG | 59 |
| NM_003620.3 | ACAAGTCCAGACATCGCGCGCCCCCCCTTCTCCGGGTCCGCCCCCTCCCCCTTCTCGGCGTCGTCGAAGA | |
| | TAAACAATAGTTGGCCGGCGAGCGCCTAGTGTGTCTCCCGCCGCCGGATTCGGCGGGCTGCGTGGGACCG | |
| | GCGGGATCCCGGCCAGCCGGCCATGGCGGGGCTGTACTCGCTGGGAGTGAGCGTCTTCTCCGACCAGGGC | |
| | GGGAGGAAGTACATGGAGGACGTTACTCAAATCGTTGTGGAGCCCGAACCGACGGCTGAAGAAAAGCCCT | |
| | CGCCGCGGCGGTCGCTGTCTCAGCCGTTGCCTCCGCGGCCGTCGCCGGCCGCCCTTCCCGGCGGCGAAGT | |
| | CTCGGGGAAAGGCCCAGCGGTGGCAGCCCGAGAGGCTCGCGACCCTCTCCCGGACGCCGGGGCCTCGCCG | |
| | GCACCTAGCCGCTGCTGCCGCCGCCGTTCCTCCGTGGCCTTTTTCGCCGTGTGCGACGGGCACGGCGGGC | |
| | GGGAGGCGGCACAGTTTGCCCGGGAGCACTTGTGGGGTTTCATCAAGAAGCAGAAGGGTTTCACCTCGTC | |
| | CGAGCCGGCTAAGGTTTGCGCTGCCATCCGCAAAGGCTTTCTCGCTTGTCACCTTGCCATGTGGAAGAAA | |
| | CTGGCGGAATGGCCAAAGACTATGACGGGTCTTCCTAGCACATCAGGGACAACTGCCAGTGTGGTCATCA | |
| | TTCGGGGCATGAAGATGTATGTAGCTCACGTAGGTGACTCAGGGGTGGTTCTTGGAATTCAGGATGACCC | |
| | GAAGGATGACTTTGTCAGAGCTGTGGAGGTGACACAGGACCATAAGCCAGAACTTCCCAAGGAAAGAGAA | |
| | CGAATCGAAGGACTTGGTGGGAGTGTAATGAACAAGTCTGGGGTGAATCGTGTAGTTTGGAAACGACCTC | |
| | GACTCACTCACAATGGACCTGTTAGAAGGAGCACAGTTATTGACCAGATTCCTTTTCTGGCAGTAGCAAG | |
| | AGCACTTGGTGATTTGTGGAGCTATGATTTCTTCAGTGGTGAATTTGTGGTGTCACCTGAACCAGACACA | |
| | AGTGTCCACACTCTTGACCCTCAGAAGCACAAGTATATTATATTGGGGAGTGATGGACTTTGGAATATGA | |
| | TTCCACCACAAGATGCCATCTCAATGTGCCAGGACCAAGAGGAGAAAAAATACCTGATGGGTGAGCATGG | |
| | ACAATCTTGTGCCAAAATGCTTGTGAATCGAGCATTGGGCCGCTGGAGGCAGCGTATGCTCCGAGCAGAT | |
| | AACACTAGTGCCATAGTAATCTGCATCTCTCCAGAAGTGGACAATCAGGGAAACTTTACCAATGAAGATG | |
| | AGTTATACCTGAACCTGACTGACAGCCCTTCCTATAATAGTCAAGAAACCTGTGTGATGACTCCTTCCCC | |
| | ATGTTCTACACCACCAGTCAAGTCACTGGAGGAGGATCCATGGCCAAGGGTGAATTCTAAGGACCATATA | |
| | CCTGCCCTGGTTCGTAGCAATGCCTTCTCAGAGAATTTTTTAGAGGTTTCAGCTGAGATAGCTCGAGAGA | |
| | ATGTCCAAGGTGTAGTCATACCCTCAAAAGATCCAGAACCACTTGAAGAAAATTGCGCTAAAGCCCTGAC | |
| | TTTAAGGATACATGATTCTTTGAATAATAGCCTTCCAATTGGCCTTGTGCCTACTAATTCAACAAACACT | |
| | GTCATGGACCAAAAAAATTTGAAGATGTCAACTCCTGGCCAAATGAAAGCCCAAGAAATTGAAAGAACCC | |
| | CTCCAACAAACTTTAAAAGGACATTAGAAGAGTCCAATTCTGGCCCCCTGATGAAGAAGCATAGACGAAA | |
| | TGGCTTAAGTCGAAGTAGTGGTGCTCAGCCTGCAAGTCTCCCCACAACCTCACAGCGAAAGAACTCTGTT | |
| | AAACTCACCATGCGACGCAGACTTAGGGGCCAGAAGAAAATTGGAAATCCTTTACTTCATCAACACAGGA | |
| | AAACTGTTTGTGTTTGCTGAAATGCATCTGGGAAATGAGGTTTTTCCAAACTTAGGATATAAGAGGGCTT | |
| | TTTAAATTTGGTGCCGATGTTGAACTTTTTTTAAGGGGAGAAAATTAAAAGAAATATACAGTTTGACTTT | |
| | TTGGAATTCAGCAGTTTTATCCTGGCCTTGTACTTGCTTGTATTGTAAATGTGGATTTTGTAGATGTTAG | |
| | GGTATAAGTTGCTGTAAAATTTGTGTAAATTTGTATCCACACAAATTCAGTCTCTGAATACACAGTATTC | |
| | AGAGTCTCTGATACACAGTAATTGTGACAATAGGGCTAAATGTTTAAAGAAATCAAAAGAATCTATTAGA | |
| | TTTTAGAAAAACATTTAAACTTTTTAAAATACTTATTAAAAAATTTGTATAAGCCACTTGTCTTGAAAAC | |
| | TGTGCAACTTTTTAAAGTAAATTATTAAGCAGACTGGAAAAGTGATGTATTTTCATAGTGACCTGTGTTT | |
| | CACTTAATGTTTCTTAGAGCCAAGTGTCTTTTAAACATTATTTTTTATTTCTGATTTCATAATTCAGAAC | |
| | TAAATTTTTCATAGAAGTGTTGAGCCATGCTACAGTTAGTCTTGTCCCAATTAAAATACTATGCAGTATC | |
| | TCTTACATCAGTAGCATTTTTCTAAAACCTTAGTCATCAGATATGCTTACTAAATCTTCAGCATAGAAGG | |
| | AAGTGTGTTTGCCTAAAACAATCTAAAACAATTCCCTTCTTTTTCATCCCAGACCAATGGCATTATTAGG | |
| | TCTTAAAGTAGTTACTCCCTTCTCGTGTTTGCTTAAAATATGTGAAGTTTTCCTTGCTATTTCAATAACA | |
| | GATGGTGCTGCTAATTCCCAACATTTCTTAAATTATTTTATATCATACAGTTTTCATTGATTATATGGGT | |
| | ATATATTCATCTAATAAATCAGTGAACTGTTCCTCATGTTGCTGAATTTGTAGTTGTTGGTTTATTTTAA | |
| | TGGTATGTACAAGTTGAGTATCCCTTATCCAAAATGCTTGGGACCAGAAGTGTTTCAGATTTTTTAAAAT | |
| | TTTGGAATATTTGCTTTATACTGAGCTTTTGAGTGTTCCCAATCTGAAATTCAAAATGCTCTAATGAGCA | |
| | TTTCCTTTGAGCATCATGCCTGCTCTGAAAAAGTTTCTGATTCTGGAGCATTTTGGATTTTGGATTTTCA | |
| | GATTAGGGATGCTTAACCTGGATTAACATTCTGTTGTGCCATGATCATGCTTTACAGTGAGTGTATTTTA | |
| | TTTATTTATTATTTTGTTTGTTTGTTTGAGATGGAGTCTCACTCTGTCATCCAGGCTAGAGTGCAGTGGC | |
| | GTGATCTCGGCTGACTGCAACCTCTGCCTCCCGGGTTCAAGTGATTCTCCTGCCTCAATCTCTCTCCCCA | |
| | GAAGCTGGGATTACAGGTGTGTGCCACCACACCCGGCTAATTTTTTTTTTTTTTTTTGAGATGGAGTCTA | |
| | GCTCTGTCATCCAGGCTGGAGTGCAGTGGTGTGATCTCGGCTCCCTGCAACCTCTGCCTTCTGGGTTCCT | |
| | GCGATTCTCCTGCCTCAGCCTCCTGAGTAGCTGAGATTACAGGCACGCGCCACTGTGCCCAGCCAATTTT | |
| | TGTATTTTTAGTAGAGATGGGGTTTCACATGTCAGTCATGCTGGTCTTGATCTCCTGACCTCGTGATCCA | |
| | CCCGCCTCGACCTCCCAAAGTACTGGGATTACAGGCGTGAGCCACCGCATCCGGCCTGAGTTTTATGCTT | |
| | TCAATGTATTTCTTACATTTCAGTTCAAGTGATTTTCATGTCTCAGCCTCCTGAGTAGCTGGAACTACAG | |
| | GTGCGTGCCACCATGCCTGGCTAAGTTTTGTATTTTTAGTAGAGATGGGTTTTCATCATGTTGGCCAAGA | |
| | TGGTCTTGATCTCTTGACCTCATGATCCACCAGCCTAGGCCTCCCAAAGTGCTGGGATTACAGGTGTGAG | |
| | CCACCGTGCCCAGCCAACTATGCCATTATTTAACCATGTCCACACATTCTGGTTATTTTCAATATTTTGC | |
| | AGAAGATAATTCTTGATCGGTGTGTCTTATGCCACAAGGATTAAAATATGTATTCATTGCTACAAAACAA | |
| | TATCTCGAAATTTAGCAGTTTAAAACAACAAATATTATCTCCAGTTTCTGAGCCTCAGAAATCTGAGAGT | |
| | GGTTTAGCTGGGTGATAGTCTCGTGGTTTTGGTCAAGCTACCAACCAGGGCTACAATCTTTCGAAGGTGT | |
| | CATTGGGGCTAGAAGATCTGCTTCCCGCAAGACTCACAGCTGTTGGCAGGAGACCTCAGTTTGTTGCCAC | |
| | ATGTTCCCCTCCAGAGGGCCTCTCACAACATGGCAGTTATTTGTCCCCAGAGCAAGCAACACCGGAGGGC | |
| | AAGGAAGAAGCCATGATGTTTTTTGTAACCTAGCCTCTGAAAGTGTCATACCAATTCTGTATTTTGTTGG | |
| | TCACACAGACCAAGTCAACTACAACGTGGGAGACTCCTACACAAGGCATGAATTCTAGGAGGTGGGCATT | |
| | TTTAAGTGTCATCTGGAAGGAGGCTGTCACAACCTGGAAGTTAAAAGCATTGATATTCTGAAATACAGCG | |
| | TGTATAACATTGTTTTAGTAGGGTGTGCAATAGTTATGTTTTGGTAATAGCATTAATGAACAATGTTATT | |
| | TTCATCTTCCAGACATCTGGAAGATTGCTCTAGTGGAGTAAAACATCTTAATGTATTTTGTCCCTAAATA | |
| | AACTATCTCACTAACAAAAAAAAAAAAAAA | |
| PTGS2 | GACCAATTGTCATACGACTTGCAGTGAGCGTCAGGAGCACGTCCAGGAACTCCTCAGCAGCGCCTCCTTC | 60 |
| NM_000963.2 | AGCTCCACAGCCAGACGCCCTCAGACAGCAAAGCCTACCCCCGCGCCGCGCCCTGCCCGCCGCTGCGATG | |
| | CTCGCCCGCGCCCTGCTGCTGTGCGCGGTCCTGGCGCTCAGCCATACAGCAAATCCTTGCTGTTCCCACC | |
| | CATGTCAAAACCGAGGTGTATGTATGAGTGTGGGATTTGACCAGTATAAGTGCGATTGTACCCGGACAGG | |
| | ATTCTATGGAGAAAACTGCTCAACACCGGAATTTTTGACAAGAATAAAATTATTTCTGAAACCCACTCCA | |
| | AACACAGTGCACTACATACTTACCCACTTCAAGGGATTTTGGAACGTTGTGAATAACATTCCCTTCCTTC | |
| | GAAATGCAATTATGAGTTATGTGTTGACATCCAGATCACATTTGATTGACAGTCCACCAACTTACAATGC | |
| | TGACTATGGCTACAAAAGCTGGGAAGCCTTCTCTAACCTCTCCTATTATACTAGAGCCCTTCCTCCTGTG | |
| | CCTGATGATTGCCCGACTCCCTTGGGTGTCAAAGGTAAAAAGCAGCTTCCTGATTCAAATGAGATTGTGG | |
| | AAAAATTGCTTCTAAGAAGAAAGTTCATCCCTGATCCCCAGGGCTCAAACATGATGTTTGCATTCTTTGC | |
| | CCAGCACTTCACGCATCAGTTTTTCAAGACAGATCATAAGCGAGGGCCAGCTTTCACCAACGGGCTGGGC | |
| | CATGGGGTGGACTTAAATCATATTTACGGTGAAACTCTGGCTAGACAGCGTAAACTGCGCCTTTTCAAGG | |
| | ATGGAAAAATGAAATATCAGATAATTGATGGAGAGATGTATCCTCCCACAGTCAAAGATACTCAGGCAGA | |
| | GATGATCTACCCTCCTCAAGTCCCTGAGCATCTACGGTTTGCTGTGGGGCAGGAGGTCTTTGGTCTGGTG | |
| | CCTGGTCTGATGATGTATGCCACAATCTGGCTGCGGGAACACAACAGAGTATGCGATGTGCTTAAACAGG | |
| | AGCATCCTGAATGGGGTGATGAGCAGTTGTTCCAGACAAGCAGGCTAATACTGATAGGAGAGACTATTAA | |
| | GATTGTGATTGAAGATTATGTGCAACACTTGAGTGGCTATCACTTCAAACTGAAATTTGACCCAGAACTA | |
| | CTTTTCAACAAACAATTCCAGTACCAAAATCGTATTGCTGCTGAATTTAACACCCTCTATCACTGGCATC | |
| | CCCTTCTGCCTGACACCTTTCAAATTCATGACCAGAAATACAACTATCAACAGTTTATCTACAACAACTC | |
| | TATATTGCTGGAACATGGAATTACCCAGTTTGTTGAATCATTCACCAGGCAAATTGCTGGCAGGGTTGCT | |
| | GGTGGTAGGAATGTTCCACCCGCAGTACAGAAAGTATCACAGGCTTCCATTGACCAGAGCAGGCAGATGA | |
| | AATACCAGTCTTTTAATGAGTACCGCAAACGCTTTATGCTGAAGCCCTATGAATCATTTGAAGAACTTAC | |
| | AGGAGAAAAGGAAATGTCTGCAGAGTTGGAAGCACTCTATGGTGACATCGATGCTGTGGAGCTGTATCCT | |
| | GCCCTTCTGGTAGAAAAGCCTCGGCCAGATGCCATCTTTGGTGAAACCATGGTAGAAGTTGGAGCACCAT | |
| | TCTCCTTGAAAGGACTTATGGGTAATGTTATATGTTCTCCTGCCTACTGGAAGCCAAGCACTTTTGGTGG | |
| | AGAAGTGGGTTTTCAAATCATCAACACTGCCTCAATTCAGTCTCTCATCTGCAATAACGTGAAGGGCTGT | |
| | CCCTTTACTTCATTCAGTGTTCCAGATCCAGAGCTCATTAAAACAGTCACCATCAATGCAAGTTCTTCCC | |
| | GCTCCGGACTAGATGATATCAATCCCACAGTACTACTAAAAGAACGTTCGACTGAACTGTAGAAGTCTAA | |
| | TGATCATATTTATTTATTTATATGAACCATGTCTATTAATTTAATTATTTAATAATATTTATATTAAACT | |
| | CCTTATGTTACTTAACATCTTCTGTAACAGAAGTCAGTACTCCTGTTGCGGAGAAAGGAGTCATACTTGT | |
| | GAAGACTTTTATGTCACTACTCTAAAGATTTTGCTGTTGCTGTTAAGTTTGGAAAACAGTTTTTATTCTG | |
| | TTTTATAAACCAGAGAGAAATGAGTTTTGACGTCTTTTTACTTGAATTTCAACTTATATTATAAGAACGA | |
| | AAGTAAAGATGTTTGAATACTTAAACACTGTCACAAGATGGCAAAATGCTGAAAGTTTTTACACTGTCGA | |
| | TGTTTCCAATGCATCTTCCATGATGCATTAGAAGTAACTAATGTTTGAAATTTTAAAGTACTTTTGGTTA | |
| | TTTTTCTGTCATCAAACAAAAACAGGTATCAGTGCATTATTAAATGAATATTTAAATTAGACATTACCAG | |
| | TAATTTCATGTCTACTTTTTAAAATCAGCAATGAAACAATAATTTGAAATTTCTAAATTCATAGGGTAGA | |
| | ATCACCTGTAAAAGCTTGTTTGATTTCTTAAAGTTATTAAACTTGTACATATACCAAAAAGAAGCTGTCT | |
| | TGGATTTAAATCTGTAAAATCAGTAGAAATTTTACTACAATTGCTTGTTAAAATATTTTATAAGTGATGT | |
| | TCCTTTTTCACCAAGAGTATAAACCTTTTTAGTGTGACTGTTAAAACTTCCTTTTAAATCAAAATGCCAA | |
| | ATTTATTAAGGTGGTGGAGCCACTGCAGTGTTATCTTAAAATAAGAATATTTTGTTGAGATATTCCAGAA | |
| | TTTGTTTATATGGCTGGTAACATGTAAAATCTATATCAGCAAAAGGGTCTACCTTTAAAATAAGCAATAA | |
| | CAAAGAAGAAAACCAAATTATTGTTCAAATTTAGGTTTAAACTTTTGAAGCAAACTTTTTTTTATCCTTG | |
| | TGCACTGCAGGCCTGGTACTCAGATTTTGCTATGAGGTTAATGAAGTACCAAGCTGTGCTTGAATAATGA | |
| | TATGTTTTCTCAGATTTTCTGTTGTACAGTTTAATTTAGCAGTCCATATCACATTGCAAAAGTAGCAATG | |
| | ACCTCATAAAATACCTCTTCAAAATGCTTAAATTCATTTCACACATTAATTTTATCTCAGTCTTGAAGCC | |
| | AATTCAGTAGGTGCATTGGAATCAAGCCTGGCTACCTGCATGCTGTTCCTTTTCTTTTCTTCTTTTAGCC | |
| | ATTTTGCTAAGAGACACAGTCTTCTCATCACTTCGTTTCTCCTATTTTGTTTTACTAGTTTTAAGATCAG | |
| | AGTTCACTTTCTTTGGACTCTGCCTATATTTTCTTACCTGAACTTTTGCAAGTTTTCAGGTAAACCTCAG | |
| | CTCAGGACTGCTATTTAGCTCCTCTTAAGAAGATTAAAAGAGAAAAAAAAAGGCCCTTTTAAAAATAGTA | |
| | TACACTTATTTTAAGTGAAAAGCAGAGAATTTTATTTATAGCTAATTTTAGCTATCTGTAACCAAGATGG | |
| | ATGCAAAGAGGCTAGTGCCTCAGAGAGAACTGTACGGGGTTTGTGACTGGAAAAAGTTACGTTCCCATTC | |
| | TAATTAATGCCCTTTCTTATTTAAAAACAAAACCAAATGATATCTAAGTAGTTCTCAGCAATAATAATAA | |
| | TGACGATAATACTTCTTTTCCACATCTCATTGTCACTGACATTTAATGGTACTGTATATTACTTAATTTA | |
| | TTGAAGATTATTATTTATGTCTTATTAGGACACTATGGTTATAAACTGTGTTTAAGCCTACAATCATTGA | |
| | TTTTTTTTTGTTATGTCACAATCAGTATATCTTCTTTGGGGTTACCTCTCTGAATATTATGTAAACAATC | |
| | CAAAGAAATGATTGTATTAAGATTTGTGAATAAATTTTTAGAAATCTGATTGGCATATTGAGATATTTAA | |
| | GGTTGAATGTTTGTCCTTAGGATAGGCCTATGTGCTAGCCCACAAAGAATATTGTCTCATTAGCCTGAAT | |
| | GTGCCATAAGACTGACCTTTTAAAATGTTTTGAGGGATCTGTGGATGCTTCGTTAATTTGTTCAGCCACA | |
| | ATTTATTGAGAAAATATTCTGTGTCAAGCACTGTGGGTTTTAATATTTTTAAATCAAACGCTGATTACAG | |
| | ATAATAGTATTTATATAAATAATTGAAAAAAATTTTCTTTTGGGAAGAGGGAGAAAATGAAATAAATATC | |
| | ATTAAAGATAACTCAGGAGAATCTTCTTTACAATTTTACGTTTAGAATGTTTAAGGTTAAGAAAGAAATA | |
| | GTCAATATGCTTGTATAAAACACTGTTCACTGTTTTTTTTAAAAAAAAAACTTGATTTGTTATTAACATT | |
| | GATCTGCTGACAAAACCTGGGAATTTGGGTTGTGTATGCGAATGTTTCAGTGCCTCAGACAAATGTGTAT | |
| | TTAACTTATGTAAAAGATAAGTCTGGAAATAAATGTCTGTTTATTTTTGTACTATTTAAAAATTGACAGA | |
| | TCTTTTCTGAAGAAAAAAAAAAAAAAA | |
| RABEP1 | GCGCACTGCTTATTTCCCGCTGTCAGGATGAGGAGGCGGAGGTCGGCGGTCGGGTCCGTCTCTGCCCGCG | 61 |
| NM_004703.4 | GCTGTGGCGGCGCCGGCGGATCCAGCCTTAGCGGTTTCTCTCTGGGCGGCGGCGGCGGCGGCTCGGTTGA | |
| | CGCCTCCTCCGCCAGCTGAGCCCGCGGGAGCCCAGGACGCCGCTTCCCCGCCCATCCCCGCTCCCCGAGG | |
| | CCGGCCGCCTGGTCATGGCGCAGCCGGGCCCGGCTTCCCAGCCTGACGTTTCTCTTCAGCAACGGGTAGC | |
| | AGAATTGGAAAAAATTAATGCAGAATTTTTACGTGCACAACAGCAGCTTGAACAAGAATTTAATCAAAAG | |
| | AGAGCAAAATTTAAGGAGTTATATTTGGCTAAAGAGGAGGATCTGAAGAGGCAAAATGCAGTATTACAAG | |
| | CTGCACAAGATGATTTGGGACACCTTCGAACCCAGCTGTGGGAAGCTCAAGCAGAGATGGAGAATATTAA | |
| | GGCGATTGCCACAGTCTCTGAGAACACCAAGCAAGAAGCTATAGATGAAGTGAAAAGACAGTGGAGAGAA | |
| | GAAGTTGCTTCACTTCAGGCTGTTATGAAAGAAACAGTTCGTGACTATGAGCACCAGTTCCACCTTAGGC | |
| | TGGAGCAGGAGCGAACACAGTGGGCACAGTATAGAGAATCCGCAGAGAGGGAAATAGCTGATTTAAGAAG | |
| | AAGGCTGTCTGAAGGTCAAGAGGAGGAAAATTTAGAAAATGAAATGAAAAAGGCCCAAGAGGATGCTGAG | |
| | AAACTTCGGTCCGTTGTGATGCCAATGGAAAAGGAAATTGCAGCTTTGAAGGATAAACTGACAGAGGCTG | |
| | AAGACAAAATTAAAGAGCTGGAGGCCTCAAAGGTTAAAGAACTGAATCATTATCTGGAAGCTGAGAAATC | |
| | TTGTAGGACTGATCTAGAGATGTATGTAGCTGTTTTGAATACTCAGAAATCTGTTCTACAGGAAGATGCT | |
| | GAGAAACTGCGGAAAGAATTGCATGAAGTTTGCCATCTCTTGGAGCAAGAGCGACAACAACACAACCAGT | |
| | TAAAACATACGTGGCAGAAGGCCAATGACCAGTTTCTGGAATCTCAGCGTTTACTGATGAGAGACATGCA | |
| | GCGAATGGAGATTGTGCTAACTTCAGAACAGCTCCGACAAGTTGAAGAACTGAAGAAGAAAGATCAGGAG | |
| | GATGATGAACAACAAAGACTCAATAAGAGAAAGGATCACAAAAAAGCAGATGTTGAGGAAGAAATAAAAA | |
| | TACCAGTAGTGTGTGCTTTAACTCAAGAAGAATCTTCAGCCCAGTTATCAAATGAAGAGGAGCATTTAGA | |
| | CAGCACCCGTGGCTCAGTTCATTCCTTAGATGCAGGCTTGCTGTTGCCATCTGGAGATCCTTTCAGTAAA | |
| | TCGGACAATGACATGTTTAAAGATGGACTCAGGAGAGCACAGTCTACAGACAGCTTGGGAACCTCGGGCT | |
| | CATTGCAATCCAAAGCTTTAGGCTATAACTACAAAGCAAAATCTGCTGGAAACCTGGACGAGTCAGATTT | |
| | TGGACCACTGGTAGGAGCAGATTCAGTGTCTGAGAACTTTGATACTGCATCCCTTGGGTCACTCCAGATG | |
| | CCAAGTGGGTTTATGTTAACCAAAGATCAGGAAAGAGCAATCAAGGCGATGACACCAGAACAAGAAGAGA | |
| | CAGCGTCCCTCCTCTCCAGCGTTACCCAGGGCATGGAGAGTGCCTATGTGTCCCCTAGTGGTTATCGTTT | |
| | AGTTAGTGAAACAGAATGGAATCTCTTGCAGAAAGAGGTACATAATGCTGGAAATAAACTTGGTAGACGT | |
| | TGTGATATGTGTTCCAATTACGAAAAACAGTTACAAGGAATTCAGATTCAGGAGGCTGAAACGAGAGACC | |
| | AGGTGAAAAAACTACAGCTGATGCTAAGGCAAGCTAATGACCAGTTAGAGAAGACAATGAAAGATAAGCA | |
| | GGAGCTGGAAGACTTCATAAAGCAAAGCAGCGAAGATTCGAGTCACCAGATCTCTGCACTCGTCCTAAGA | |
| | GCCCAGGCCTCCGAGATCTTACTTGAAGAGTTACAGCAGGGGCTTTCCCAGGCAAAGAGGGATGTTCAGG | |
| | AACAGATGGCGGTGCTGATGCAGTCACGGGAACAGGTTTCAGAAGAGCTGGTGAGGTTACAGAAAGATAA | |
| | TGACAGTCTCCAGGGAAAGCACAGCCTGCATGTGTCATTACAGCAAGCAGAAGACTTCATCCTCCCAGAC | |
| | ACTACAGAGGCACTGCGGGAGTTGGTATTAAAATACCGTGAGGACATCATTAATGTGCGGACAGCAGCAG | |
| | ACCACGTAGAAGAAAAGCTGAAGGCTGAGATACTTTTCCTAAAAGAGCAGATCCAAGCAGAACAGTGTTT | |
| | AAAAGAAAATCTTGAAGAAACTCTGCAACTAGAAATAGAAAACTGCAAGGAGGAAATAGCTTCTATTTCT | |
| | AGCCTAAAAGCTGAATTAGAAAGAATAAAAGTGGAAAAAGGACAGTTGGAGTCCACATTAAGAGAGAAGT | |
| | CTCAACAGCTTGAGAGTCTTCAGGAAATAAAGATCAGTTTGGAAGAGCAGTTAAAGAAAGAGACTGCTGC | |
| | TAAGGCTACCGTTGAACAACTAATGTTTGAAGAGAAGAATAAAGCTCAGAGATTACAGACAGAATTAGAT | |
| | GTCAGTGAGCAAGTCCAGAGGGATTTTGTAAAGCTTTCACAGACCCTTCAGGTGCAGTTAGAGCGGATCC | |
| | GGCAAGCTGACTCCTTGGAGAGAATCCGGGCAATTCTGAATGATACTAAACTGACAGACATTAACCAGCT | |
| | TCCTGAGACATGACACCCTCATGGCAGGATTCTAGCCTGCACTTTGGGTTTTTAACTCATCTTTAGAGCA | |
| | ACAGTAATTATTATTTAACTCTTAACTGAAGAAAGAGAAGTCACAACAAAAGGAAGACTGGAGAAATGCT | |
| | TACTTCTAGAGGGAGAAGACTGTGCGGCACAGGAAACAGCAAACAGTGGGGTGATCTGCAGCCCAGAGAC | |
| | CTTCAAATGCGAACACTATAAACTCCAGGCTTGATTCCAACAGGCGTGGGATCAGATTTGGTGATGGAAA | |
| | AAGCGCTGTTTCCTTGCCTGCTTTCTCCAAGACAGATTTTCGGAACACATTTCCCTACCCTAAAGCGACA | |
| | TCCCAGTAGTGTTTGGAATTTTCTGTTCATAGATATTGGAAGAGAGAATTTGCTTTATCTGTTGTCTAGA | |
| | GCTCATCAGTAACAGTATTCAGTTAGCAGACAGAAGTGTAGTATGCTGTATGAATATTTTATATTAAAAT | |
| | ATGAAGGTTTGAGAGCAGGCCATTGGCTACTGACTGTATTTTGTTTTCCTTTTACCATTTTATCTTATCT | |
| | TGCTTTGGAGGACCTTAAATGCTACTGAAACTTACCTGAGAACCATAGGACTGTGGCAAACAAAACCAAT | |
| | TCATGAAGTGAATTAATGATGAGGATCTGAAAACTTGGCTGGGGCTATATATACTGGAAGTTGAAGGTTA | |
| | AAGGAAAAGCACAAGAAACTTTGGAAGCACTTTTTCTGCATACTTAGATGATCTTCATGGGCCCACAGGG | |
| | TACCAGGATAAAGCCGAACTGGTACCATCTACTCTTTTGAAGTGTTTTAGTCTAGTTATTGGATCAGTGA | |
| | AAAACATTAGTATACGTTTTTAAATAGGCTAATTTTTCAACTTGGATCATTAGGCTTACGTACTACTTGT | |
| | TTCAAATGTGTCAAATACAAAAATGGTAACTAGGTTGACAGATACTTTGTATTTTTCTTTTGAATTCAGA | |
| | CCTGGAATGTAAGTAAGTGACAATGCTTATGGAAAGCCAGTTAGTTAGAATTGGAAATCTGTCTTGTCAT | |
| | TTTACAAGCATTAGATTCCTTTCCTGTGTGAAGAAAGCCTCAGTGAAACAGGTCTTTGCCATAACTTTAT | |
| | GAAGTGCTACAGAAAGCACAAAGAATTGATTCATGTTCATCAATACCTGCTGAGAGTACTGTCCCAGGAA | |
| | TATCCAGTGGATGGATTCATCATCCAGGAGGTTCAAAAGTAAGATGGTTTTCAAATCATTTTTGAGACTG | |
| | GTTGCATAACAGCAGGGTACCTGAAAGAGCCTTCTGGGAGTTAGTGAACTAGGTAGATTGTTTTGTTCAC | |
| | ATAACGCCACCATCAACTTAAAGTGAATTGTCTTTGTTATAAATGAGGTCACTATGGACTTACCCTAAAG | |
| | ATCTTCTGTACTTCTCTCTTCCATAGGACAAATGATAAGTACTACATACCTCATCTCTTGGGTTATTATT | |
| | GTAGTCTTGCATTCATGGTTATGAATTTAAAAATAAATACCAATTATGGAAATAGTACTAAAGGCTTGCC | |
| | GCACATGAAACATTATTTTAATTGGTTTAAAGTCCCTTTATAAAGAGTGCTACATGGTTTAGATAAAGGA | |
| | AACATATAACTATTGAGTTACAGGGGATTTTATTAATTATAAAATGCAATCAATTTAAATTACGTAGGTT | |
| | TAAGACTAGTCCCTTGGATAAGCCCCAAGCGAATTTGTCTTCAGATTATTAAAATTAGTGCTGTAAATCA | |
| | GGGTGGGCAATTCACAGCCTTTCTGAACTGACTGAACTAGAGCTTGCAGTGAAGTGTTCTGCTGAGACTG | |
| | AGCACCTTACAGATATTTTTCTCCAGAAGATGGTGCTGGGTAATAAAATCATCACAATTAGGGAATGGTT | |
| | AGTGGTCTCTACTGTGGCAAATGCCAACTGTTGGAATTCACTTTATTGTAGAAAAACCCAAACTGAGACT | |
| | CTTAAGTTTTGTTTAGCAATGTGTTTCTGGTATGAAACAAACTACTGTGTCACTGTCCAGGTAGGAAACA | |
| | ATTCTTTCAACTGGGTTTTCAGCATAAATGGGAACTGATGTAGAAGGCAGGATTTAGCCCTTCTAGGCAA | |
| | AAGAAAAGCTCAGTTGGGTTTCACGAGTGTTCCTGTGCTTATATTCAGTCTGTGCCTACATGTTCTCATG | |
| | CATGTCTAACCTGATTTACCTCTTACCTGTAACCTACCTTATCATGTGGCTTTTAATTGACAGTCACTCA | |
| | GCCATTTCTAAGCAGATATAGTAGTACCTTTCAGAACTCACATTGGCAAGTGTAAAAAGATGACTTAAGG | |
| | TGAAGTGAGGACAAAATCACATTCTGCATACTAACCTATTTTTTTCTCCCTTTAAGGTGCTAAACTTGCA | |
| | CCTCATGTCCACTCAGTAACAAGTATTGGGACGTAGAGCACAGCCTCACTCAGCTCTGAAAGGTAATACA | |
| | GCTTGTGAGGAAGTGAGCCAGCAGTGGCCTTTGCAATTGTGGATCTTGAGCTCTGCTCTCAGCAGATTTC | |
| | AGGTGTAACCATTTGTTAACTGTACTGAAGGTGTGTCCTCAAGAAGAAAGTGTTCAAATTAAAAAAGCTG | |
| | CTGCCAAGTACAAAAAAAAAAAAAAAAAAAA | |
| RARA | GTGCCTCTTGCAGCAGCCTAACCCAGAAGCAGGGGGGAATCCTGAATCGAGCTGAGAGGGCTTCCCCGGT | 62 |
| NM_000964.3 | TCTCCTGGGAACCCCATCGGCCCCCTGCCAGCACACACCTGAGCAGCATCACAGGACATGGCCCCCTCAG | |
| | CCACCTAGCTGGGGCCCATCTAGGAGTGGCATCTTTTTTGGTGCCCTGAAGGCCAGCTCTGGACCTTCCC | |
| | AGGAAAAGTGCCAGCTCACAGAACTGCTTGACCAAAGGACCGGCTCTTGAGACATCCCCCAACCCACCTG | |
| | GCCCCCAGCTAGGGTGGGGGCTCCAGGAGACTGAGATTAGCCTGCCCTCTTTGGACAGCAGCTCCAGGAC | |
| | AGGGCGGGTGGGCTGACCACCCAAACCCCATCTGGGCCCAGGCCCCATGCCCCGAGGAGGGGTGGTCTGA | |
| | AGCCCACCAGAGCCCCCTGCCAGACTGTCTGCCTCCCTTCTGACTGTGGCCGCTTGGCATGGCCAGCAAC | |
| | AGCAGCTCCTGCCCGACACCTGGGGGCGGGCACCTCAATGGGTACCCGGTGCCTCCCTACGCCTTCTTCT | |
| | TCCCCCCTATGCTGGGTGGACTCTCCCCGCCAGGCGCTCTGACCACTCTCCAGCACCAGCTTCCAGTTAG | |
| | TGGATATAGCACACCATCCCCAGCCACCATTGAGACCCAGAGCAGCAGTTCTGAAGAGATAGTGCCCAGC | |
| | CCTCCCTCGCCACCCCCTCTACCCCGCATCTACAAGCCTTGCTTTGTCTGTCAGGACAAGTCCTCAGGCT | |
| | ACCACTATGGGGTCAGCGCCTGTGAGGGCTGCAAGGGCTTCTTCCGCCGCAGCATCCAGAAGAACATGGT | |
| | GTACACGTGTCACCGGGACAAGAACTGCATCATCAACAAGGTGACCCGGAACCGCTGCCAGTACTGCCGA | |
| | CTGCAGAAGTGCTTTGAAGTGGGCATGTCCAAGGAGTCTGTGAGAAACGACCGAAACAAGAAGAAGAAGG | |
| | AGGTGCCCAAGCCCGAGTGCTCTGAGAGCTACACGCTGACGCCGGAGGTGGGGGAGCTCATTGAGAAGGT | |
| | GCGCAAAGCGCACCAGGAAACCTTCCCTGCCCTCTGCCAGCTGGGCAAATACACTACGAACAACAGCTCA | |
| | GAACAACGTGTCTCTCTGGACATTGACCTCTGGGACAAGTTCAGTGAACTCTCCACCAAGTGCATCATTA | |
| | AGACTGTGGAGTTCGCCAAGCAGCTGCCCGGCTTCACCACCCTCACCATCGCCGACCAGATCACCCTCCT | |
| | CAAGGCTGCCTGCCTGGACATCCTGATCCTGCGGATCTGCACGCGGTACACGCCCGAGCAGGACACCATG | |
| | ACCTTCTCGGACGGGCTGACCCTGAACCGGACCCAGATGCACAACGCTGGCTTCGGCCCCCTCACCGACC | |
| | TGGTCTTTGCCTTCGCCAACCAGCTGCTGCCCCTGGAGATGGATGATGCGGAGACGGGGCTGCTCAGCGC | |
| | CATCTGCCTCATCTGCGGAGACCGCCAGGACCTGGAGCAGCCGGACCGGGTGGACATGCTGCAGGAGCCG | |
| | CTGCTGGAGGCGCTAAAGGTCTACGTGCGGAAGCGGAGGCCCAGCCGCCCCCACATGTTCCCCAAGATGC | |
| | TAATGAAGATTACTGACCTGCGAAGCATCAGCGCCAAGGGGGCTGAGCGGGTGATCACGCTGAAGATGGA | |
| | GATCCCGGGCTCCATGCCGCCTCTCATCCAGGAAATGTTGGAGAACTCAGAGGGCCTGGACACTCTGAGC | |
| | GGACAGCCGGGGGGTGGGGGGCGGGACGGGGGTGGCCTGGCCCCCCCGCCAGGCAGCTGTAGCCCCAGCC | |
| | TCAGCCCCAGCTCCAACAGAAGCAGCCCGGCCACCCACTCCCCGTGACCGCCCACGCCACATGGACACAG | |
| | CCCTCGCCCTCCGCCCCGGCTTTTCTCTGCCTTTCTACCGACCATGTGACCCCGCACCAGCCCTGCCCCC | |
| | ACCTGCCCTCCCGGGCAGTACTGGGGACCTTCCCTGGGGGACGGGGAGGGAGGAGGCAGCGACTCCTTGG | |
| | ACAGAGGCCTGGGCCCTCAGTGGACTGCCTGCTCCCACAGCCTGGGCTGACGTCAGAGGCCGAGGCCAGG | |
| | AACTGAGTGAGGCCCCTGGTCCTGGGTCTCAGGATGGGTCCTGGGGGCCTCGTGTTCATCAAGACACCCC | |
| | TCTGCCCAGCTCACCACATCTTCATCACCAGCAAACGCCAGGACTTGGCTCCCCCATCCTCAGAACTCAC | |
| | AAGCCATTGCTCCCCAGCTGGGGAACCTCAACCTCCCCCCTGCCTCGGTTGGTGACAGAGGGGGTGGGAC | |
| | AGGGGCGGGGGGTTCCCCCTGTACATACCCTGCCATACCAACCCCAGGTATTAATTCTCGCTGGTTTTGT | |
| | TTTTATTTTAATTTTTTTGTTTTGATTTTTTTAATAAGAATTTTCATTTTAAGCACATTTATACTGAAGG | |
| | AATTTGTGCTGTGTATTGGGGGGAGCTGGATCCAGAGCTGGAGGGGGTGGGTCCGGGGGAGGGAGTGGCT | |
| | CGGAAGGGGCCCCCACTCTCCTTTCATGTCCCTGTGCCCCCCAGTTCTCCTCCTCAGCCTTTTCCTCCTC | |
| | AGTTTTCTCTTTAAAACTGTGAAGTACTAACTTTCCAAGGCCTGCCTTCCCCTCCCTCCCACTGGAGAAG | |
| | CCGCCAGCCCCTTTCTCCCTCTGCCTGACCACTGGGTGTGGACGGTGTGGGGCAGCCCTGAAAGGACAGG | |
| | CTCCTGGCCTTGGCACTTGCCTGCACCCACCATGAGGCATGGAGCAGGGCAGAGCAAGGGCCCCGGGACA | |
| | GAGTTTTCCCAGACCTGGCTCCTCGGCAGAGCTGCCTCCCGTCAGGGCCCACATCATCTAGGCTCCCCAG | |
| | CCCCCACTGTGAAGGGGCTGGCCAGGGGCCCGAGCTGCCCCCACCCCCGGCCTCAGCCACCAGCACCCCC | |
| | ATAGGGCCCCCAGACACCACACACATGCGCGTGCGCACACACACAAACACACACACACTGGACAGTAGAT | |
| | GGGCCGACACACACTTGGCCCGAGTTCCTCCATTTCCCTGGCCTGCCCCCCACCCCCAACCTGTCCCACC | |
| | CCCGTGCCCCCTCCTTACCCCGCAGGACGGGCCTACAGGGGGGTCTCCCCTCACCCCTGCACCCCCAGCT | |
| | GGGGGAGCTGGCTCTGCCCCGACCTCCTTCACCAGGGGTTGGGGCCCCTTCCCCTGGAGCCCGTGGGTGC | |
| | ACCTGTTACTGTTGGGCTTTCCACTGAGATCTACTGGATAAAGAATAAAGTTCTATTTATTCTAAAAAAA | |
| | AAAAAAAAAAA | |
| RHOC | ATTGAAGGCTGGGCAGAGTCTGAGTCCACCCGGGTCGTGCTCCCCCCGCTCGCCCGGCTCCTCCGCAGTC | 63 |
| NM_175744.4 | CAGGAATCTCCCCGTGGCTCTCCCCGACCTGGAGGGGTGGACGCCCCTGGCCCCCAGTCCCCGGCCTGCG | |
| | GAGGGGGCCGGTGGCTGCGGCCCTGCGCGGGGCCGGGGCGGGCCGAGCCAAGGGCCGCCCCCGGCCGACC | |
| | CTCCCCCTGCCGGGCCCGCCCTCCCCGCCGCGGCGCTGGAGGAGGGCGGGGCGGGGCCCTGGGGTCAGTC | |
| | TGAGCCTCCGGCACCGGCCGCGCAGCTGGAGGCGGCGGAGCGGAAGCCTTGACTTCATCTCAGCTCCAGA | |
| | GCCCGCCCTCTCTTCCTGCAGCCTGGGAACTTCAGCCGGCTGGAGCCCCACCATGGCTGCAATCCGAAAG | |
| | AAGCTGGTGATCGTTGGGGATGGTGCCTGTGGGAAGACCTGCCTCCTCATCGTCTTCAGCAAGGATCAGT | |
| | TTCCGGAGGTCTACGTCCCTACTGTCTTTGAGAACTATATTGCGGACATTGAGGTGGACGGCAAGCAGGT | |
| | GGAGCTGGCTCTGTGGGACACAGCAGGGCAGGAAGACTATGATCGACTGCGGCCTCTCTCCTACCCGGAC | |
| | ACTGATGTCATCCTCATGTGCTTCTCCATCGACAGCCCTGACAGCCTGGAAAACATTCCTGAGAAGTGGA | |
| | CCCCAGAGGTGAAGCACTTCTGCCCCAACGTGCCCATCATCCTGGTGGGGAATAAGAAGGACCTGAGGCA | |
| | AGACGAGCACACCAGGAGAGAGCTGGCCAAGATGAAGCAGGAGCCCGTTCGGTCTGAGGAAGGCCGGGAC | |
| | ATGGCGAACCGGATCAGTGCCTTTGGCTACCTTGAGTGCTCAGCCAAGACCAAGGAGGGAGTGCGGGAGG | |
| | TGTTTGAGATGGCCACTCGGGCTGGCCTCCAGGTCCGCAAGAACAAGCGTCGGAGGGGCTGTCCCATTCT | |
| | CTGAGATCCCCAAGGCCTTTCCTACATGCCCCCTCCCTTCACAGGGGTACAGAAATTATCCCCCTACAAC | |
| | CCCAGCCTCCTGAGGGCTCCATGCTGAAGGCTCCCATTTTCAGTTCCCTCCTGCCCAGGACTGCATTGTT | |
| | TTCTAGCCCCGAGGTGGTGGCACGGGCCCTCCCTCCCAGCGCTCTGGGAGCCACGCCTATGCCCTGCCCT | |
| | TCCTCAGGGCCCCTGGGGATCTTGCCCCCTTTGACCTTCCCCAAAGGATGGTCACACACCAGCACTTTAT | |
| | ACACTTCTGGCTCACAGGAAAGTGTCTGCAGTAGGGGACCCAGAGTCCCAGGCCCCTGGAGTTGTTTTCG | |
| | GCAGGGGCCTTGTCTCTCACTGCATTTGGTCAGGGGGGCATGAATAAAGGCTACAGGCTCCAACGTGAAA | |
| | AAAAAAAAAAAAAAA | |
| ROPN1 | TAGCACTTCATAGACTGCTATCACGCATTCATTTTTACTAGTACCTATTGAACACTAAGTTCCAGGCACT | 64 |
| NM_017578.2 | GGGCTAGGCACTGGGATGGTGTGGTGAGCAAAAACTGACCAGTCCTGCCGTGGAGTTTGCTGGGGGAGAC | |
| | ACATGTTACTCAAAGAATCACACTAAGGATAGCAATTTATCTCAAAGCTGCAAGTTCCTGCCATCTACAT | |
| | GTGCCCAGAGTCCCCAAAATTGAGTGTCAAACAGAGGCTGGGTGACCTCCTGTCCAGGATTGCTCTCATC | |
| | GTATGAATCGAAGTTTTCATCTTAACGTGTTTTTTTCTCCTGAGAATAGGCCAACCAATCAATGGCTCAG | |
| | ACAGATAAGCCAACATGCATCCCGCCGGAGCTGCCGAAGATGCTGAAGGAGTTTGCCAAAGCCGCCATTA | |
| | GGGTGCAGCCGCAGGACCTCATCCAGTGGGCAGCCGATTATTTTGAGGCCCTGTCCCGTGGAGAGACGCC | |
| | TCCGGTGAGAGAGCGGTCTGAGCGAGTCGCTTTGTGTAACCGGGCAGAGCTAACACCTGAGCTGTTAAAG | |
| | ATCCTGCATTCTCAGGTTGCTGGCAGACTGATCATCCGTGCAGAGGAGCTGGCCCAGATGTGGAAAGTGG | |
| | TGAATCTCCCAACAGATCTGTTTAATAGTGTGATGAATGTGGGTCGCTTCACGGAGGAGATCGAGTGGCT | |
| | GAAGTTTTTAGCCCTTGCTTGCAGCGCTCTGGGAGTTACTATTACCAAAACTCTCAAGATAGTGTGTGAG | |
| | GTCTTATCATGTGACCATAATGGTGGGTCGCCCCGGATCCCGTTCAGCACCTTCCAGTTTCTCTACACGT | |
| | ATATTGCCAAAGTGGATGGGGAGATCTCTGCATCACATGTCAGCAGGATGCTAAACTACATGGAACAGGA | |
| | AGTAATTGGCCCTGATGGTATAATCACAGTGAATGACTTTACCCAAAACCCCAGGGTTCAGCTGGAGTAA | |
| | AAGCACAATTTTGGCAATTTTAAAGGAAGATACAGAGATGATTGTACTTCAGAATGACTGAAACCCATAT | |
| | ACCACCCAAAATCCATTTTCTTGTACAACTGGTACACACTAATAAACAATTAAAAAAAAAAA | |
| S100A7 | GTCCAAACACACACATCTCACTCATCCTTCTACTCGTGACGCTTCCCAGCTCTGGCTTTTTGAAAGCAAA | 65 |
| NM_002963.3 | GATGAGCAACACTCAAGCTGAGAGGTCCATAATAGGCATGATCGACATGTTTCACAAATACACCAGACGT | |
| | GATGACAAGATTGAGAAGCCAAGCCTGCTGACGATGATGAAGGAGAACTTCCCCAACTTCCTTAGTGCCT | |
| | GTGACAAAAAGGGCACAAATTACCTCGCCGATGTCTTTGAGAAAAAGGACAAGAATGAGGATAAGAAGAT | |
| | TGATTTTTCTGAGTTTCTGTCCTTGCTGGGAGACATAGCCACAGACTACCACAAGCAGAGCCATGGAGCA | |
| | GCGCCCTGTTCCGGGGGCAGCCAGTGACCCAGCCCCACCAATGGGCCTCCAGAGACCCCAGGAACAATAA | |
| | AATGTCTTCTCCCACCAGAAAAAAAAAAAA | |
| S100A8 | GAGAAACCAGAGACTGTAGCAACTCTGGCAGGGAGAAGCTGTCTCTGATGGCCTGAAGCTGTGGGCAGCT | 66 |
| NM_002964.4 | GGCCAAGCCTAACCGCTATAAAAAGGAGCTGCCTCTCAGCCCTGCATGTCTCTTGTCAGCTGTCTTTCAG | |
| | AAGACCTGGTGGGGCAAGTCCGTGGGCATCATGTTGACCGAGCTGGAGAAAGCCTTGAACTCTATCATCG | |
| | ACGTCTACCACAAGTACTCCCTGATAAAGGGGAATTTCCATGCCGTCTACAGGGATGACCTGAAGAAATT | |
| | GCTAGAGACCGAGTGTCCTCAGTATATCAGGAAAAAGGGTGCAGACGTCTGGTTCAAAGAGTTGGATATC | |
| | AACACTGATGGTGCAGTTAACTTCCAGGAGTTCCTCATTCTGGTGATAAAGATGGGCGTGGCAGCCCACA | |
| | AAAAAAGCCATGAAGAAAGCCACAAAGAGTAGCTGAGTTACTGGGCCCAGAGGCTGGGCCCCTGGACATG | |
| | TACCTGCAGAATAATAAAGTCATCAATACCTCAAAAAAAAAA | |
| S100A9 | AAACACTCTGTGTGGCTCCTCGGCTTTGACAGAGTGCAAGACGATGACTTGCAAAATGTCGCAGCTGGAA | 67 |
| NM_002965.3 | CGCAACATAGAGACCATCATCAACACCTTCCACCAATACTCTGTGAAGCTGGGGCACCCAGACACCCTGA | |
| | ACCAGGGGGAATTCAAAGAGCTGGTGCGAAAAGATCTGCAAAATTTTCTCAAGAAGGAGAATAAGAATGA | |
| | AAAGGTCATAGAACACATCATGGAGGACCTGGACACAAATGCAGACAAGCAGCTGAGCTTCGAGGAGTTC | |
| | ATCATGCTGATGGCGAGGCTAACCTGGGCCTCCCACGAGAAGATGCACGAGGGTGACGAGGGCCCTGGCC | |
| | ACCACCATAAGCCAGGCCTCGGGGAGGGCACCCCCTAAGACCACAGTGGCCAAGATCACAGTGGCCACGG | |
| | CCACGGCCACAGTCATGGTGGCCACGGCCACAGCCACTAATCAGGAGGCCAGGCCACCCTGCCTCTACCC | |
| | AACCAGGGCCCCGGGGCCTGTTATGTCAAACTGTCTTGGCTGTGGGGCTAGGGGCTGGGGCCAAATAAAG | |
| | TCTCTTCCTCCAAGTCAAAAAAAAAA | |
| SHC1 | AGAGAAGAGGCTCCACGTTGGGCGGGGATGGGGCCTGAAACTGTCTGGGTCTGAGCTGGGGAGCGGAAGC | 68 |
| NM_183001.4 | CACTTGTCCCTCTCCCTCCCCAGGACTTCTGTGACTCCTGGGCCACAGAGGTCCAACCAGGCTAAGGGCC | |
| | TGGGGATACCCCCTGCCTGGCCCCCTTGCCCAAACTGGCAGGGGGGCCAGGCTGGGCAGCAGCCCCTCTT | |
| | TCACCTCAACTATGGATCTCCTGCCCCCCAAGCCCAAGTACAATCCACTCCGGAATGAGTCTCTGTCATC | |
| | GCTGGAGGAAGGGGCTTCTGGGTCCACCCCCCCGGAGGAGCTGCCTTCCCCATCAGCTTCATCCCTGGGG | |
| | CCCATCCTGCCTCCTCTGCCTGGGGACGATAGTCCCACTACCCTGTGCTCCTTCTTCCCCCGGATGAGCA | |
| | ACCTGAGGCTGGCCAACCCGGCTGGGGGGCGCCCAGGGTCTAAGGGGGAGCCAGGAAGGGCAGCTGATGA | |
| | TGGGGAGGGGATCGTAGGGGCAGCCATGCCAGACTCAGGCCCCCTACCCCTCCTCCAGGACATGAACAAG | |
| | CTGAGTGGAGGCGGCGGGCGCAGGACTCGGGTGGAAGGGGGCCAGCTTGGGGGCGAGGAGTGGACCCGCC | |
| | ACGGGAGCTTTGTCAATAAGCCCACGCGGGGCTGGCTGCATCCCAACGACAAAGTCATGGGACCCGGGGT | |
| | TTCCTACTTGGTTCGGTACATGGGTTGTGTGGAGGTCCTCCAGTCAATGCGTGCCCTGGACTTCAACACC | |
| | CGGACTCAGGTCACCAGGGAGGCCATCAGTCTGGTGTGTGAGGCTGTGCCGGGTGCTAAGGGGGCGACAA | |
| | GGAGGAGAAAGCCCTGTAGCCGCCCGCTCAGCTCTATCCTGGGGAGGAGTAACCTGAAATTTGCTGGAAT | |
| | GCCAATCACTCTCACCGTCTCCACCAGCAGCCTCAACCTCATGGCCGCAGACTGCAAACAGATCATCGCC | |
| | AACCACCACATGCAATCTATCTCATTTGCATCCGGCGGGGATCCGGACACAGCCGAGTATGTCGCCTATG | |
| | TTGCCAAAGACCCTGTGAATCAGAGAGCCTGCCACATTCTGGAGTGTCCCGAAGGGCTTGCCCAGGATGT | |
| | CATCAGCACCATTGGCCAGGCCTTCGAGTTGCGCTTCAAACAATACCTCAGGAACCCACCCAAACTGGTC | |
| | ACCCCTCATGACAGGATGGCTGGCTTTGATGGCTCAGCATGGGATGAGGAGGAGGAAGAGCCACCTGACC | |
| | ATCAGTACTATAATGACTTCCCGGGGAAGGAACCCCCCTTGGGGGGGGTGGTAGACATGAGGCTTCGGGA | |
| | AGGAGCCGCTCCAGGGGCTGCTCGACCCACTGCACCCAATGCCCAGACCCCCAGCCACTTGGGAGCTACA | |
| | TTGCCTGTAGGACAGCCTGTTGGGGGAGATCCAGAAGTCCGCAAACAGATGCCACCTCCACCACCCTGTC | |
| | CAGGCAGAGAGCTTTTTGATGATCCCTCCTATGTCAACGTCCAGAACCTAGACAAGGCCCGGCAAGCAGT | |
| | GGGTGGTGCTGGGCCCCCCAATCCTGCTATCAATGGCAGTGCACCCCGGGACCTGTTTGACATGAAGCCC | |
| | TTCGAAGATGCTCTTCGCGTGCCTCCACCTCCCCAGTCGGTGTCCATGGCTGAGCAGCTCCGAGGGGAGC | |
| | CCTGGTTCCATGGGAAGCTGAGCCGGCGGGAGGCTGAGGCACTGCTGCAGCTCAATGGGGACTTCCTGGT | |
| | ACGGGAGAGCACGACCACACCTGGCCAGTATGTGCTCACTGGCTTGCAGAGTGGGCAGCCTAAGCATTTG | |
| | CTACTGGTGGACCCTGAGGGTGTGGTTCGGACTAAGGATCACCGCTTTGAAAGTGTCAGTCACCTTATCA | |
| | GCTACCACATGGACAATCACTTGCCCATCATCTCTGCGGGCAGCGAACTGTGTCTACAGCAACCTGTGGA | |
| | GCGGAAACTGTGATCTGCCCTAGCGCTCTCTTCCAGAAGATGCCCTCCAATCCTTTCCACCCTATTCCCT | |
| | AACTCTCGGGACCTCGTTTGGGAGTGTTCTGTGGGCTTGGCCTTGTGTCAGAGCTGGGAGTAGCATGGAC | |
| | TCTGGGTTTCATATCCAGCTGAGTGAGAGGGTTTGAGTCAAAAGCCTGGGTGAGAATCCTGCCTCTCCCC | |
| | AAACATTAATCACCAAAGTATTAATGTACAGAGTGGCCCCTCACCTGGGCCTTTCCTGTGCCAACCTGAT | |
| | GCCCCTTCCCCAAGAAGGTGAGTGCTTGTCATGGAAAATGTCCTGTGGTGACAGGCCCAGTGGAACAGTC | |
| | ACCCTTCTGGGCAAGGGGGAACAAATCACACCTCTGGGCTTCAGGGTATCCCAGACCCCTCTCAACACCC | |
| | GCCCCCCCCATGTTTAAACTTTGTGCCTTTGACCATCTCTTAGGTCTAATGATATTTTATGCAAACAGTT | |
| | CTTGGACCCCTGAATTCAATGACAGGGATGCCAACACCTTCTTGGCTTCTGGGACCTGTGTTCTTGCTGA | |
| | GCACCCTCTCCGGTTTGGGTTGGGATAACAGAGGCAGGAGTGGCAGCTGTCCCCTCTCCCTGGGGATATG | |
| | CAACCCTTAGAGATTGCCCCAGAGCCCCACTCCCGGCCAGGCGGGAGATGGACCCCTCCCTTGCTCAGTG | |
| | CCTCCTGGCCGGGGCCCCTCACCCCAAGGGGTCTGTATATACATTTCATAAGGCCTGCCCTCCCATGTTG | |
| | CATGCCTATGTACTCTACGCCAAAGTGCAGCCCTTCCTCCTGAAGCCTCTGCCCTGCCTCCCTTTCTGGG | |
| | AGGGCGGGGTGGGGGTGACTGAATTTGGGCCTCTTGTACAGTTAACTCTCCCAGGTGGATTTTGTGGAGG | |
| | TGAGAAAAGGGGCATTGAGACTATAAAGCAGTAGACAATCCCCACATACCATCTGTAGAGTTGGAACTGC | |
| | ATTCTTTTAAAGTTTTATATGCATATATTTTAGGGCTGTAGACTTACTTTCCTATTTTCTTTTCCATTGC | |
| | TTATTCTTGAGCACAAAATGATAATCAATTATTACATTTATACATCACCTTTTTGACTTTTCCAAGCCCT | |
| | TTTACAGCTCTTGGCATTTTCCTCGCCTAGGCCTGTGAGGTAACTGGGATCGCACCTTTTATACCAGAGA | |
| | CCTGAGGCAGATGAAATTTATTTCCATCTAGGACTAGAAAAACTTGGGTCTCTTACCGCGAGACTGAGAG | |
| | GCAGAAGTCAGCCCGAATGCCTGTCAGTTTCATGGAGGGGAAACGCAAAACCTGCAGTTCCTGAGTACCT | |
| | TCTACAGGCCCGGCCCAGCCTAGGCCCGGGGTGGCCACACCACAGCAAGCCGGCCCCCCCTCTTTTGGCC | |
| | TTGTGGATAAGGGAGAGTTGACCGTTTTCATCCTGGCCTCCTTTTGCTGTTTGGATGTTTCCACGGGTCT | |
| | CACTTATACCAAAGGGAAAACTCTTCATTAAAGTCCGTATTTCTTCTAAAAAAAAAAAAAAAA | |
| TAP1 | GTGTGCGTGATGGAGAAAATTGGGCACCAGGGCTGCTCCCGAGATTCTCAGATCTGATTTCCACGCTTGC | 69 |
| NM_000593.5 | TACCAAAATAGTCTGGGCAGGCCACTTTTGGAAGTAGGCGTTATCTAGTGAGCAGGCGGCCGCTTTCGAT | |
| | TTCGCTTTCCCCTAAATGGCTGAGCTTCTCGCCAGCGCAGGATCAGCCTGTTCCTGGGACTTTCCGAGAG | |
| | CCCCGCCCTCGTTCCCTCCCCCAGCCGCCAGTAGGGGAGGACTCGGCGGTACCCGGAGCTTCAGGCCCCA | |
| | CCGGGGCGCGGAGAGTCCCAGGCCCGGCCGGGACCGGGACGGCGTCCGAGTGCCAATGGCTAGCTCTAGG | |
| | TGTCCCGCTCCCCGCGGGTGCCGCTGCCTCCCCGGAGCTTCTCTCGCATGGCTGGGGACAGTACTGCTAC | |
| | TTCTCGCCGACTGGGTGCTGCTCCGGACCGCGCTGCCCCGCATATTCTCCCTGCTGGTGCCCACCGCGCT | |
| | GCCACTGCTCCGGGTCTGGGCGGTGGGCCTGAGCCGCTGGGCCGTGCTCTGGCTGGGGGCCTGCGGGGTC | |
| | CTCAGGGCAACGGTTGGCTCCAAGAGCGAAAACGCAGGTGCCCAGGGCTGGCTGGCTGCTTTGAAGCCAT | |
| | TAGCTGCGGCACTGGGCTTGGCCCTGCCGGGACTTGCCTTGTTCCGAGAGCTGATCTCATGGGGAGCCCC | |
| | CGGGTCCGCGGATAGCACCAGGCTACTGCACTGGGGAAGTCACCCTACCGCCTTCGTTGTCAGTTATGCA | |
| | GCGGCACTGCCCGCAGCAGCCCTGTGGCACAAACTCGGGAGCCTCTGGGTGCCCGGCGGTCAGGGCGGCT | |
| | CTGGAAACCCTGTGCGTCGGCTTCTAGGCTGCCTGGGCTCGGAGACGCGCCGCCTCTCGCTGTTCCTGGT | |
| | CCTGGTGGTCCTCTCCTCTCTTGGGGAGATGGCCATTCCATTCTTTACGGGCCGCCTCACTGACTGGATT | |
| | CTACAAGATGGCTCAGCCGATACCTTCACTCGAAACTTAACTCTCATGTCCATTCTCACCATAGCCAGTG | |
| | CAGTGCTGGAGTTCGTGGGTGACGGGATCTATAACAACACCATGGGCCACGTGCACAGCCACTTGCAGGG | |
| | AGAGGTGTTTGGGGCTGTCCTGCGCCAGGAGACGGAGTTTTTCCAACAGAACCAGACAGGTAACATCATG | |
| | TCTCGGGTAACAGAGGACACGTCCACCCTGAGTGATTCTCTGAGTGAGAATCTGAGCTTATTTCTGTGGT | |
| | ACCTGGTGCGAGGCCTATGTCTCTTGGGGATCATGCTCTGGGGATCAGTGTCCCTCACCATGGTCACCCT | |
| | GATCACCCTGCCTCTGCTTTTCCTTCTGCCCAAGAAGGTGGGAAAATGGTACCAGTTGCTGGAAGTGCAG | |
| | GTGCGGGAATCTCTGGCAAAGTCCAGCCAGGTGGCCATTGAGGCTCTGTCGGCCATGCCTACAGTTCGAA | |
| | GCTTTGCCAACGAGGAGGGCGAAGCCCAGAAGTTTAGGGAAAAGCTGCAAGAAATAAAGACACTCAACCA | |
| | GAAGGAGGCTGTGGCCTATGCAGTCAACTCCTGGACCACTAGTATTTCAGGTATGCTGCTGAAAGTGGGA | |
| | ATCCTCTACATTGGTGGGCAGCTGGTGACCAGTGGGGCTGTAAGCAGTGGGAACCTTGTCACATTTGTTC | |
| | TCTACCAGATGCAGTTCACCCAGGCTGTGGAGGTACTGCTCTCCATCTACCCCAGAGTACAGAAGGCTGT | |
| | GGGCTCCTCAGAGAAAATATTTGAGTACCTGGACCGCACCCCTCGCTGCCCACCCAGTGGTCTGTTGACT | |
| | CCCTTACACTTGGAGGGCCTTGTCCAGTTCCAAGATGTCTCCTTTGCCTACCCAAACCGCCCAGATGTCT | |
| | TAGTGCTACAGGGGCTGACATTCACCCTACGCCCTGGCGAGGTGACGGCGCTGGTGGGACCCAATGGGTC | |
| | TGGGAAGAGCACAGTGGCTGCCCTGCTGCAGAATCTGTACCAGCCCACCGGGGGACAGCTGCTGTTGGAT | |
| | GGGAAGCCCCTTCCCCAATATGAGCACCGCTACCTGCACAGGCAGGTGGCTGCAGTGGGACAAGAGCCAC | |
| | AGGTATTTGGAAGAAGTCTTCAAGAAAATATTGCCTATGGCCTGACCCAGAAGCCAACTATGGAGGAAAT | |
| | CACAGCTGCTGCAGTAAAGTCTGGGGCCCATAGTTTCATCTCTGGACTCCCTCAGGGCTATGACACAGAG | |
| | GTAGACGAGGCTGGGAGCCAGCTGTCAGGGGGTCAGCGACAGGCAGTGGCGTTGGCCCGAGCATTGATCC | |
| | GGAAACCGTGTGTACTTATCCTGGATGATGCCACCAGTGCCCTGGATGCAAACAGCCAGTTACAGGTGGA | |
| | GCAGCTCCTGTACGAAAGCCCTGAGCGGTACTCCCGCTCAGTGCTTCTCATCACCCAGCACCTCAGCCTG | |
| | GTGGAGCAGGCTGACCACATCCTCTTTCTGGAAGGAGGCGCTATCCGGGAGGGGGGAACCCACCAGCAGC | |
| | TCATGGAGAAAAAGGGGTGCTACTGGGCCATGGTGCAGGCTCCTGCAGATGCTCCAGAATGAAAGCCTTC | |
| | TCAGACCTGCGCACTCCATCTCCCTCCCTTTTCTTCTCTCTGTGGTGGAGAACCACAGCTGCAGAGTAGG | |
| | CAGCTGCCTCCAGGATGAGTTACTTGAAATTTGCCTTGAGTGTGTTACCTCCTTTCCAAGCTCCTCGTGA | |
| | TAATGCAGACTTCCTGGAGTACAAACACAGGATTTGTAATTCCTTACTGTAACGGAGTTTAGAGCCAGGG | |
| | CTGATGCTTTGGTGTGGCCAGCACTCTGAAACTGAGAAATGTTCAGAATGTACGGAAAGATGATCAGCTA | |
| | TTTTCAACATAACTGAAGGCATATGCTGGCCCATAAACACCCTGTAGGTTCTTGATATTTATAATAAAAT | |
| | TGGTGTTTTGTAAAAAAAAAAAAAAAAAAAAAAA | |
| TP73L | AGGGGACGCAGCGAAACCGGGGCCCGCGCCAGGCCAGCCGGGACGGACGCCGATGCCCGGGGCTGCGACG | 70 |
| NM_005427.3 | GCTGCAGAGCGAGCTGCCCTCGGAGGCCGGCGTGGGGAAGATGGCCCAGTCCACCGCCACCTCCCCTGAT | |
| | GGGGGCACCACGTTTGAGCACCTCTGGAGCTCTCTGGAACCAGACAGCACCTACTTCGACCTTCCCCAGT | |
| | CAAGCCGGGGGAATAATGAGGTGGTGGGCGGAACGGATTCCAGCATGGACGTCTTCCACCTGGAGGGCAT | |
| | GACTACATCTGTCATGGCCCAGTTCAATCTGCTGAGCAGCACCATGGACCAGATGAGCAGCCGCGCGGCC | |
| | TCGGCCAGCCCCTACACCCCAGAGCACGCCGCCAGCGTGCCCACCCACTCGCCCTACGCACAACCCAGCT | |
| | CCACCTTCGACACCATGTCGCCGGCGCCTGTCATCCCCTCCAACACCGACTACCCCGGACCCCACCACTT | |
| | TGAGGTCACTTTCCAGCAGTCCAGCACGGCCAAGTCAGCCACCTGGACGTACTCCCCGCTCTTGAAGAAA | |
| | CTCTACTGCCAGATCGCCAAGACATGCCCCATCCAGATCAAGGTGTCCACCCCGCCACCCCCAGGCACCG | |
| | CCATCCGGGCCATGCCTGTTTACAAGAAAGCGGAGCACGTGACCGACGTCGTGAAACGCTGCCCCAACCA | |
| | CGAGCTCGGGAGGGACTTCAACGAAGGACAGTCTGCTCCAGCCAGCCACCTCATCCGCGTGGAAGGCAAT | |
| | AATCTCTCGCAGTATGTGGATGACCCTGTCACCGGCAGGCAGAGCGTCGTGGTGCCCTATGAGCCACCAC | |
| | AGGTGGGGACGGAATTCACCACCATCCTGTACAACTTCATGTGTAACAGCAGCTGTGTAGGGGGCATGAA | |
| | CCGGCGGCCCATCCTCATCATCATCACCCTGGAGATGCGGGATGGGCAGGTGCTGGGCCGCCGGTCCTTT | |
| | GAGGGCCGCATCTGCGCCTGTCCTGGCCGCGACCGAAAAGCTGATGAGGACCACTACCGGGAGCAGCAGG | |
| | CCCTGAACGAGAGCTCCGCCAAGAACGGGGCCGCCAGCAAGCGTGCCTTCAAGCAGAGCCCCCCTGCCGT | |
| | CCCCGCCCTTGGTGCCGGTGTGAAGAAGCGGCGGCATGGAGACGAGGACACGTACTACCTTCAGGTGCGA | |
| | GGCCGGGAGAACTTTGAGATCCTGATGAAGCTGAAAGAGAGCCTGGAGCTGATGGAGTTGGTGCCGCAGC | |
| | CACTGGTGGACTCCTATCGGCAGCAGCAGCAGCTCCTACAGAGGCCGAGTCACCTACAGCCCCCGTCCTA | |
| | CGGGCCGGTCCTCTCGCCCATGAACAAGGTGCACGGGGGCATGAACAAGCTGCCCTCCGTCAACCAGCTG | |
| | GTGGGCCAGCCTCCCCCGCACAGTTCGGCAGCTACACCCAACCTGGGGCCCGTGGGCCCCGGGATGCTCA | |
| | ACAACCATGGCCACGCAGTGCCAGCCAACGGCGAGATGAGCAGCAGCCACAGCGCCCAGTCCATGGTCTC | |
| | GGGGTCCCACTGCACTCCGCCACCCCCCTACCACGCCGACCCCAGCCTCGTCAGTTTTTTAACAGGATTG | |
| | GGGTGTCCAAACTGCATCGAGTATTTCACCTCCCAAGGGTTACAGAGCATTTACCACCTGCAGAACCTGA | |
| | CCATTGAGGACCTGGGGGCCCTGAAGATCCCCGAGCAGTACCGCATGACCATCTGGCGGGGCCTGCAGGA | |
| | CCTGAAGCAGGGCCACGACTACAGCACCGCGCAGCAGCTGCTCCGCTCTAGCAACGCGGCCACCATCTCC | |
| | ATCGGCGGCTCAGGGGAACTGCAGCGCCAGCGGGTCATGGAGGCCGTGCACTTCCGCGTGCGCCACACCA | |
| | TCACCATCCCCAACCGCGGCGGCCCAGGCGGCGGCCCTGACGAGTGGGCGGACTTCGGCTTCGACCTGCC | |
| | CGACTGCAAGGCCCGCAAGCAGCCCATCAAGGAGGAGTTCACGGAGGCCGAGATCCACTGAGGGCCTCGC | |
| | CTGGCTGCAGCCTGCGCCACCGCCCAGAGACCCAAGCTGCCTCCCCTCTCCTTCCTGTGTGTCCAAAACT | |
| | GCCTCAGGAGGCAGGACCTTCGGGCTGTGCCCGGGGAAAGGCAAGGTCCGGCCCATCCCCAGGCACCTCA | |
| | CAGGCCCCAGGAAAGGCCCAGCCACCGAAGCCGCCTGTGGACAGCCTGAGTCACCTGCAGAACCTTCTGG | |
| | AGCTGCCCTAGTGCTGGGCTTGTGGGGCGGGGGCTGGCCCACTCTCAGCCCTGCCACTGCCCCGGCGTGC | |
| | TCCATGGCAGGCGTGGGTGGGGACCGCAGCGTCGGCTCCGACTTCCAGGCTTCATCCTAGAGACTGTCAT | |
| | CTCCCAACCAGGCGAGGTCCTTCCAAAGGAAAGGATCCTCTTTGCTGATGGACTGCCAAAAAGTATTTTG | |
| | CGACATCTTTTGGTTCTGGATAGTAGTGAGCAGCCAAGTGACTGTGTCTGAAACACCAGTGTATTTTCAG | |
| | GGAATGTCCCTAACTGCGTCTTGCCCGCGCCGGGGGCTGGGGACTCTCTCTGCTGGACTTGGGACTGGCC | |
| | TCTGCCCCCAGCACGCTGTATTCTGCAGGACCGCCTCCTTCCTGCCCCTAACAACAACCACAGTGTTGCT | |
| | GAAATTGGAGAAAACTGGGGAGGGCGCAACCCCCCCCAGGCGCGGGGAAGCATGTGGTACCGCCTCAGCC | |
| | AGTGCCCCTCAGCCTGGCCACAGTCGCCTCTCCTCGGGGACCCCTCAGCAGAAAGGGACAGCCTGTCCTT | |
| | AGAGGACTGGAAATTGTCAATATTTGATAAAATGATACCCTTTTCTACATGGTGGGTCAGCTTTTTTTTT | |
| | TTTTTTTTTAACTTTCTTTCTCAGCATTCTCTTTGGAGTTCAACCTAGCGCCCATGAGCCAGGCTGAGGA | |
| | AGCTGAGTGAGAAGCCAGGTGGGCGGGACTTGTTCCCAGGAAGGCCGGGTGGGGAGGAAGCCTAGAGGGA | |
| | ACCCCAGGAAGGGCAAATCCAGGCAAATCTGCAGGAATGCTCTGCCATGGGAGCAGCTCCTCCCTTGCCA | |
| | CGGCCACCTTCTCTAGCACTGCAAGGTCCACAGGGCATTGCTTTCCTTTCTAGGCGGTGGCAGTCAGGGA | |
| | ACAGACTGAGGTAGGTGTAGGGGGGTCTAGGCCTTCGTGGAGCACCCCAGGGAGTTAGTAGGCCCCGGGG | |
| | AGACAGAGTCTGCACAGGCCCTTTCTGGGGCCACCTCCATCCACGAGGAGCAGCCTGAGCCTTGGTGGCC | |
| | GAACCTTGACCGTCCCGGAGCACAGCTTCAGGGCAGGGAACCGGAGCCCCTGGGGGGCCTCACGGGTGTG | |
| | ACGAGGCCCTTCATTGCAGGCAGGTGGGCCAATGGGAGCCCTCACCCACGCAAGCCGAGACACCACCCAG | |
| | AGTGCAGGCTGCCTGGCCCCTTCTGGCACGGCCAGCTCCACACCCCCTGCCTAGGGTATGTGTGGTCCTA | |
| | AGGGCTAGGAGCTTCCCCTACTAACATCTCCCAGAAAAAGCAGTTAAGCCCCTCAGGGCACAGCAAGGTT | |
| | AGACACAGCCCCCATCCCCAGATCAGGACTCCATCTTGCTAAGTGGCATCACCGTCACCAGCCTCCCCTT | |
| | ATTTAAAAGCAGCGACTGGTGTTGCCGCAGGTACCTGGTCTACGAAGACGCAGGCATCCCTCTCCCACCG | |
| | TCCACCTCCCCGGGGGCCGCTGACAGCACAGTCGCCTGGGTGCACGCTTGTGGGGGCAGCAGGAACGGGG | |
| | CTGTCGGCTCTCAGGGGATCTGGCTGCAGCCAGGGCGAGGGCCTGGCCCTTCCTTCCAGCTCCTTCCGGC | |
| | TCCTTCCAGCTGAAGGGCAGGAAGCTCTGGCCGCTTAGCTTCTAGGGTTCCATCTCCCTAGAAAGGTGCC | |
| | CACGCCCAGGGCATCAGTCAGTAGCGGCAGCAGCAGCAGACTCGGGGCTTTCCCAGGGTGGCGCAGCCAC | |
| | CCCAGCTGCATGTCACCTCAGCTCTCCATCTTATTGCCATTTTGTAGATGAGGAAGCTGAGACCAGAAAG | |
| | GCTAAGACCCATGCCCCAGGCACCACACCCATCTCTTGGGGGCTGGGCACCTGCTACCCGAGGCCACCTC | |
| | CTGAAGCCCCCACTCTTCCCCCATGTTCCACTTCAGGAGCCGCGGGGGCCCATCCTGACACCCGGGGTTC | |
| | CTCAGCCCAGCGCAGATGTGCTTCAGTTCCAGAGGGCTTGTTGATTTGTTTCTTAGGTACGTTACCTGTC | |
| | CACCCTGAGTCCAGTGAGGCTGTCCCAAGAGCCCCTGTAGTGTGCTCCTGGGAAGGGCTGGGGGGGCTGG | |
| | GGGGGCTGGGAGAGGCCCAGGGGCAGCTGTCACTGGAACCCCAGCCAGATGTCCAAGGAAGCCGGCCAGA | |
| | ACACGGAGCAGCCAGATGGCCCCAGCTGCACCTGTCTAGGGAGCCCATGCAGCCTCCTTGCACTGGAGAA | |
| | GCAGCTGTGAAAGTAGACAGAGTTGAGACTTCGCCGTGGTCAGGAGAAAATGCAAATTCCCAGGAACAAG | |
| | AATCCTTTAAGTGATATGTTTTTATAAAACTAAACAAATCAACAAATAAATCTTGAAGGCGGATGGTTTT | |
| | CCCAGCAGTGCAGGGGTTGGAGGGAGGCTGCTGGCACTCCTGGGGCCAAGGGGGACAGGCAGTGGTCCTG | |
| | AGTCTGCTCAGAGAGGCAAGGCAGAAGGAGCTCGCCAGGCAGGTCAGCTCACATCTGTCCAAGTCGCTCT | |
| | GGTCAGAAACAGCGACTCTCCCCCATTCCCCCAGCGTTCCCACCAGGCCTGGGCTGCTGGGAAGCCCTTG | |
| | CTGTACCCAGGAGCCCGACCCGCAGTATCCTGGCACAGAGCCACTTGTCACTCAGAACAGTCAGTGTCTC | |
| | CAACGCACAAACATCCACTCCTCTGTTACCAGTTAAAGCACTTTAATGCTTTAAGGTGAAAACGAAATCC | |
| | CATCCGTGTTTTTCGTGTAAGATCGTGCTTCTCCGAGCAGTATTAATGGACGCCCTCCAATGACATAACA | |
| | ACTGTTTTTGGTAATGTAATCTTGGGAAAATGTGTTATTTTTTTAGCTGTGTTTCAGTGGGGATTTTTGT | |
| | TTTTGTAACATAATAAAGTGTATGTTCCAATGAAAAAAAAAAAA | |
| CKS2 | AGTCTCCGGCGAGTTGTTGCCTGGGCTGGACGTGGTTTTGTCTGCTGCGCCCGCTCTTCGCGCTCTCGTT | 71 |
| NM_001827.1 | TCATTTTCTGCAGCGCGCCACGAGGATGGCCCACAAGCAGATCTACTACTCGGACAAGTACTTCGACGAA | |
| | CACTACGAGTACCGGCATGTTATGTTACCCAGAGAACTTTCCAAACAAGTACCTAAAACTCATCTGATGT | |
| | CTGAAGAGGAGTGGAGGAGACTTGGTGTCCAACAGAGTCTAGGCTGGGTTCATTACATGATTCATGAGCC | |
| | AGAACCACATATTCTTCTCTTTAGACGACCTCTTCCAAAAGATCAACAAAAATGAAGTTTATCTGGGGAT | |
| | CGTCAAATCTTTTTCAAATTTAATGTATATGTGTATATAAGGTAGTATTCAGTGAATACTTGAGAAATGT | |
| | ACAAATCTTTCATCCATACCTGTGCATGAGCTGTATTCTTCACAGCAACAGAGCTCAGTTAAATGCAACT | |
| | GCAAGTAGGTTACTGTAAGATGTTTAAGATAAAAGTTCTTCCAGTCAGTTTTTCTCTTAAGTGCCTGTTT | |
| | GAGTTTACTGAAACAGTTTACTTTTGTTCAATAAAGTTTGTATGTTGCATTTAAAAAAAAAAAAAAA | |
| FAM54A | AGCAGTCCTGTCATGCGGAAGTAGCAGTCCGGTCCTAGGGACTAGCAGGTGGGTTGGTTGGGCGCAGGAG | 72 |
| NM_001099286.1 | GACGGGGGCGCGCTTCCCATAACATTACCCTGGCTGAGCGTGAGGCTCCAGGGCTGGGCACCGGGTTGAC | |
| | CTCTTATTCCTCGCTGAGGGCATCGTTACCGCCTGTGGCTGCAAGCCGAGGCGCGCGGGTGGAAACTGGG | |
| | TCGAGGTCTGGGTAGACGTCTGAGCGATCTGCACAAGGAGTGGCGCAGTCTGGAATTTGATTGAGGATTC | |
| | CTAACGCCCTCCGCTTGATGTTCTGGTGATTCCCGGGGGCTCGGCTTCGGAGGAAGGCACCAAGAAACTG | |
| | ATAATGTTCCTTTGAATTGGCTTCTGTATTTGCTTCATCAATGTCTCTCATACTGAATATCTTAAGAGAG | |
| | ATGCTGGAATATTTTGGCGTTCCTGTAGAACAGGTTTTGCTGATTTGGGAAAATAAAGACTATGGATCAA | |
| | CTAGGAGTATTGTTCGTATTATTGGGAAAATGCTTCCACTGGAACCTTGTCGAAGACCTAATTTTGAGTT | |
| | GATCCCGCTCTTGAACTCTGTAGACTCTGATAATTGTGGATCTATGGTTCCATCTTTTGCTGATATTTTG | |
| | TATGTGGCAAATGATGAAGAAGCCAGTTATCTCAGATTTCGAAATAGTATATGGAAAAATGAAGAAGAGA | |
| | AAGTGGAAATTTTTCATCCTTTGCGACTAGTTCGGGATCCACTGTCACCTGCTGTAAGACAGAAAGAAAC | |
| | TGTGAAAAATGACCTGCCTGTAAATGAAGCTGCAATTAGAAAAATAGCTGCCCTTGAAAATGAGCTGACT | |
| | TTTCTTCGCTCTCAGATTGCAGCAATTGTGGAAATGCAGGAACTGAAAAATAGTACAAATTCTAGTTCCT | |
| | TTGGCTTGAGTGACGAGCGCATTAGTTTGGGTCAGCTGTCATCATCGCGGGCTGCCCATCTGAGTGTGGA | |
| | CCCAGATCAGCTTCCAGGTTCAGTGCTTTCTCCTCCTCCTCCTCCACCACTTCCTCCTCAGTTTTCATCT | |
| | CTCCAGCCACCGTGTTTTCCTCCCGTACAACCAGGATCTAATAATATTTGTGACTCAGATAATCCAGCAA | |
| | CTGAAATGAGCAAACAGAACCCGGCTGCTAATAAGACCAATTATAGTCATCATTCAAAAAGCCAGAGAAA | |
| | TAAAGATATTCCAAACATGTTGGACGTTCTAAAGGATATGAATAAGGTTAAGCTTCGTGCAATTGAGCGG | |
| | TCACCTGGCGGTAGACCCATTCATAAGAGGAAAAGACAGAATTCACATTGGGATCCAGTTTCTTTAATAT | |
| | CTCATGCACTTAAACAGAAATTTGCATTTCAAGAAGATGATTCTTTTGAGAAAGAGAATAGATCTTGGGA | |
| | ATCTTCCCCATTTTCTAGTCCAGAAACTTCAAGGTTTGGACATCACATTTCACAGTCAGAAGGACAGCGA | |
| | ACTAAAGAAGAAATGGTCAACACAAAAGCTGTTGACCAAGGTATCAGCAACACAAGCCTTCTAAACTCAA | |
| | GGATTTAAACTCAACTTAAGGTTGAGCTTTAAACTTCCAAAACTTCTTCCTGGATGATAAATTATTCTTA | |
| | GAAACTGATTTGGACTGTTAAAGGCTAAAAGTAGATGTATTTAAAGACTCTTCTTGACACATTTTGCCTA | |
| | CACTTGCTATGTAAATATGTATGCCTGTCATTTTTGTTTCCTTTGTTCCTTTTTACGTTTATACTCTGTT | |
| | CTTCTGTACATAGAGCTTAAAATAAACATTCTTTTTGAACTTGAAAAAAAAAAAAAAAAAA | |
| GTPBP4 | GGAAGTCCCACCTGCGCCCGACGGCGGAAGTTCCGGGAGTGCCAAGTACCCGCGTGCATACGGCTGCCGG | 73 |
| NM_012341.2 | CATGGCACATTACAACTTCAAGAAAATTACGGTGGTGCCGTCCGCCAAGGACTTCATAGACCTCACGTTG | |
| | TCGAAGACTCAACGAAAGACTCCAACCGTTATTCATAAACATTACCAAATACATCGCATTAGACATTTTT | |
| | ACATGAGAAAAGTCAAATTTACTCAACAGAATTACCATGATAGACTTTCACAAATTCTAACAGATTTCCC | |
| | CAAATTGGATGATATTCATCCGTTCTATGCTGATTTGATGAATATTCTCTACGACAAGGATCATTACAAG | |
| | TTGGCTCTGGGGCAAATAAATATTGCCAAAAATTTAGTGGACAATGTTGCTAAAGATTATGTGCGACTGA | |
| | TGAAGTATGGCGACTCTCTCTACCGCTGCAAACAGCTGAAGCGTGCGGCCCTGGGACGGATGTGCACAGT | |
| | GATCAAGAGGCAGAAGCAGAGTTTGGAGTATTTGGAGCAAGTGCGTCAGCATTTATCCCGTTTGCCAACC | |
| | ATTGATCCGAATACCAGGACCCTGCTTTTGTGTGGGTACCCAAATGTTGGGAAGTCCAGCTTCATCAACA | |
| | AGGTGACGAGAGCAGACGTGGATGTCCAGCCCTATGCGTTCACAACCAAGTCTCTGTTTGTTGGGCACAT | |
| | GGATTATAAGTATCTACGTTGGCAGGTTGTAGACACTCCTGGGATCCTGGACCACCCTCTGGAGGATAGG | |
| | AACACCATCGAGATGCAGGCCATCACTGCCCTGGCCCACCTCCGTGCTGCGGTCCTGTATGTGATGGATT | |
| | TGTCTGAGCAGTGTGGGCATGGGCTGAGGGAGCAGCTAGAACTCTTCCAGAACATCAGACCTCTCTTCAT | |
| | CAACAAGCCTCTCATAGTTGTAGCCAACAAATGTGATGTGAAGAGAATAGCTGAACTTTCTGAAGATGAT | |
| | CAGAAAATATTTACAGATTTGCAGTCTGAAGGATTCCCTGTAATAGAGACCAGCACCCTGACTGAGGAAG | |
| | GTGTTATTAAAGTTAAAACAGAGGCTTGCGATAGGCTTTTGGCTCATCGAGTGGAAACCAAAATGAAGGG | |
| | AAATAAAGTGAATGAGGTGCTGAATAGACTGCACCTGGCTATCCCAACCAGGAGGGACGATAAGGAGAGG | |
| | CCCCCTTTCATCCCTGAAGGAGTGGTGGCTCGCAGGAAGAGGATGGAAACTGAGGAGTCCAGGAAGAAGA | |
| | GGGAACGAGATCTTGAGCTGGAAATGGGAGATGATTATATTTTGGATCTTCAGAAGTACTGGGATTTAAT | |
| | GAATTTGTCTGAAAAACATGATAAGATACCAGAAATCTGGGAAGGCCATAATATAGCTGATTATATTGAT | |
| | CCAGCCATCATGAAGAAATTGGAAGAATTAGAAAAAGAAGAAGAGCTGAGAACAGCTGCTGGAGAGTATG | |
| | ACAGTGTATCTGAGAGTGAAGACGAAGAGATGCTGGAAATCCGACAGCTGGCAAAGCAAATTCGAGAGAA | |
| | AAAGAAGTTGAAAATTCTGGAGTCCAAAGAAAAGAATACACAGGGACCCAGGATGCCGCGAACTGCTAAG | |
| | AAGGTTCAGAGGACAGTTTTGGAGAAGGAGATGCGTAGTCTTGGTGTTGACATGGACGATAAAGACGATG | |
| | CCCATTACGCAGTCCAGGCAAGAAGATCCCGGAGCATCACTAGGAAAAGAAAGCGGGAAGACTCTGCTCC | |
| | CCCGTCCTCTGTGGCCCGGAGTGGGAGTTGCTCTCGAACTCCACGTGACGTTTCTGGTCTTAGGGATGTC | |
| | AAGATGGTGAAGAAAGCCAAGACTATGATGAAGAATGCTCAGAAGAAGATGAATCGGTTGGGGAAGAAAG | |
| | GGGAGGCGGATAGACACGTGTTTGATATGAAGCCCAAGCACTTGCTGTCTGGGAAGAGGAAAGCTGGTAA | |
| | AAAGGACAGGAGATAGTATCCGTTTGGTTGGCGTGGCTTCGCTAGAGTGTTGCTGTTTATTTCCTGGTTT | |
| | GGCACAGTATGGTTTCATGAAATTGGAGCTCTGTATAAACTGAAAAAGACAAAATAAGTAAAGCACTTGT | |
| | TGCTTTGCTGAAAACTATGGTTAACCCTATATAGGTGTGGGAAATTTTTGTCACTGCATAATATTACAAA | |
| | TATTTTGAGTAGACAGTGTTTCCACATTTAATGGAGTATCAGTTGCTTCAGATTTTCAGAACTGGGAAGA | |
| | TTTACTGGTGTAACTGGGTTGTTTTTGATGGAGAAAAACCTTATTTTCTTTTGTAAGAGCTGGGAGCAAA | |
| | CACGTTTATGAGTGTGTCGGAATCCCGTGCTTAAAATACGCTCTTAAATTATTTTCTAGTCTTATTTTAC | |
| | AATGTCTCATTGTAGTCTGTCTTCAACTATTTTATCCAAAATAAACCTCCAGAAGAAAGTAGTTTTCATT | |
| | TACTTAGCTCATGTTTTGGTTTAGTTATAGTCGCTATGGATTTGGCCAAATAAAAAGGCAAACAACAAAA | |
| | AAAAAAAAAAAAAAAAA | |
| HSPA14 | GGGAGGCTGTAGCGGCCGACCGGACGCAGGGGGCTGGCGGGAACGTGAAGCTCCGCGGTGCCTGATGGGG | 74 |
| NM_016299.2 | CCGTTGGGCGGCCGGTAGCTGTTGCTGTTGGGGGACCCCCTCATTCCTGCCGCTGCCGTCCCTGCTGCCT | |
| | CATGGCGGCCATCGGAGTTCACCTGGGCTGCACCTCAGCCTGTGTGGCCGTCTATAAGGATGGCCGGGCT | |
| | GGTGTGGTTGCAAATGATGCCGGTGACCGAGTTACTCCAGCTGTTGTTGCTTACTCAGAAAATGAAGAGA | |
| | TTGTTGGATTGGCAGCAAAACAAAGTAGAATAAGAAATATTTCAAATACAGTAATGAAAGTAAAGCAGAT | |
| | CCTGGGCAGAAGCTCCAGTGATCCACAAGCTCAGAAATACATCGCGGAAAGTAAATGTTTAGTCATTGAA | |
| | AAAAATGGGAAATTACGATATGAAATAGATACTGGAGAAGAAACAAAATTTGTTAACCCAGAAGATGTTG | |
| | CCAGACTGATATTTAGTAAAATGAAAGAAACGGCACATTCTGTATTGGGCTCAGATGCAAATGATGTAGT | |
| | TATTACTGTCCCGTTTGATTTTGGAGAAAAGCAAAAAAATGCTCTTGGAGAAGCAGCTAGAGCTGCTGGA | |
| | TTTAATGTTTTGCGATTAATTCACGAACCGTCTGCAGCTCTTCTTGCTTATGGAATTGGACAAGACTCCC | |
| | CTACTGGAAAAAGCAATATTTTGGTGTTTAAGCTTGGAGGAACATCCTTATCTCTCAGCGTCATGGAAGT | |
| | TAACAGTGGAATATATCGGGTTCTTTCAACAAACACTGATGATAACATCGGTGGTGCACATTTCACAGAA | |
| | ACCTTAGCACAGTATCTAGCTTCTGAGTTCCAAAGATCCTTCAAACATGATGTGAGAGGAAATGCGCGAG | |
| | CCATGATGAAATTAACGAACAGTGCTGAAGTAGCGAAACATTCTTTGTCAACCTTGGGAAGTGCCAACTG | |
| | TTTTCTTGACTCATTATATGAAGGTCAAGATTTTGATTGCAATGTGTCCAGAGCAAGATTTGAACTTCTT | |
| | TGTTCTCCACTTTTTAATAAGTGTATAGAAGCAATCAGAGGACTCTTAGATCAAAATGGATTTACAGCAG | |
| | ATGATATCAACAAGGTTGTCCTTTGTGGAGGGTCTTCTCGAATCCCAAAGCTACAGCAACTGATTAAAGA | |
| | TCTTTTCCCAGCTGTTGAGCTTCTCAATTCTATCCCTCCTGATGAAGTGATCCCTATTGGTGCAGCTATA | |
| | GAAGCAGGAATTCTTATTGGGAAAGAAAACCTGTTGGTGGAAGACTCTCTTATGATAGAGTGTTCAGCCA | |
| | GAGATATTTTAGTTAAGGGTGTGGACGAATCAGGAGCCAGTAGATTCACAGTGCTGTTTCCATCAGGGAC | |
| | TCCTTTGCCAGCTCGAAGACAACACACATTGCAAGCCCCTGGAAGCATATCTTCAGTGTGCCTTGAACTC | |
| | TATGAGTCTGATGGGAAGAACTCTGCCAAAGAGGAAACCAAGTTTGCACAGGTTGTACTCCAGGATTTAG | |
| | ATAAAAAAGAAAATGGATTACGTGATATATTAGCTGTTCTTACTATGAAAAGGGATGGATCTTTACATGT | |
| | GACATGCACAGATCAAGAAACTGGAAAATGTGAAGCAATCTCTATTGAGATAGCATCTTAGTGTTTTAGA | |
| | GAAATCAAGAATTTTTAAAAACAAGAATATCAACATTTGGTTTTGTGTATAAGTGGTGTTTGTATTAAAA | |
| | TACTTTTTCAATGAACTGTATAAACTATGTTTTATTAAACTACAATATATCAGTAAAAAA | |
| PCNA | GGATGGCCGGAGCTGGCGCCCTGGTTCTGGAGGTAACCGGTTACTGAGGGCGAGAAGCGCCACCCGGAGG | 75 |
| NM_002592.2 | CTCTAGCCTGACAAATGCTTGCTGACCTGGGCCAGAGCTCTTCCCTTACGCAAGTCTCAGCCGGTCGTCG | |
| | CGACGTTCGCCCGCTCGCTCTGAGGCTCCTGAAGCCGAAACCAGCTAGACTTTCCTCCTTCCCGCCTGCC | |
| | TGTAGCGGCGTTGTTGCCACTCCGCCACCATGTTCGAGGCGCGCCTGGTCCAGGGCTCCATCCTCAAGAA | |
| | GGTGTTGGAGGCACTCAAGGACCTCATCAACGAGGCCTGCTGGGATATTAGCTCCAGCGGTGTAAACCTG | |
| | CAGAGCATGGACTCGTCCCACGTCTCTTTGGTGCAGCTCACCCTGCGGTCTGAGGGCTTCGACACCTACC | |
| | GCTGCGACCGCAACCTGGCCATGGGCGTGAACCTCACCAGTATGTCCAAAATACTAAAATGCGCCGGCAA | |
| | TGAAGATATCATTACACTAAGGGCCGAAGATAACGCGGATACCTTGGCGCTAGTATTTGAAGCACCAAAC | |
| | CAGGAGAAAGTTTCAGACTATGAAATGAAGTTGATGGATTTAGATGTTGAACAACTTGGAATTCCAGAAC | |
| | AGGAGTACAGCTGTGTAGTAAAGATGCCTTCTGGTGAATTTGCACGTATATGCCGAGATCTCAGCCATAT | |
| | TGGAGATGCTGTTGTAATTTCCTGTGCAAAAGACGGAGTGAAATTTTCTGCAAGTGGAGAACTTGGAAAT | |
| | GGAAACATTAAATTGTCACAGACAAGTAATGTCGATAAAGAGGAGGAAGCTGTTACCATAGAGATGAATG | |
| | AACCAGTTCAACTAACTTTTGCACTGAGGTACCTGAACTTCTTTACAAAAGCCACTCCACTCTCTTCAAC | |
| | GGTGACACTCAGTATGTCTGCAGATGTACCCCTTGTTGTAGAGTATAAAATTGCGGATATGGGACACTTA | |
| | AAATACTACTTGGCTCCCAAGATCGAGGATGAAGAAGGATCTTAGGCATTCTTAAAATTCAAGAAAATAA | |
| | AACTAAGCTCTTTGAGAACTGCTTCTAAGATGCCAGCATATACTGAAGTCTTTTCTGTCACCAAATTTGT | |
| | ACCTCTAAGTACATATGTAGATATTGTTTTCTGTAAATAACCTATTTTTTTCTCTATTCTCTGCAATTTG | |
| | TTTAAAGAATAAAGTCCAAAGTCAGATCTGGTCTAGTTAACCTAGAAGTATTTTTGTCTCTTAGAAATAC | |
| | TTGTGATTTTTATAATACAAAAGGGTCTTGACTCTAAATGCAGTTTTAAGAATTGTTTTTGAATTTAAAT | |
| | AAAGTTACTTGAATTTCAAACATCA | |
| FOXA1 | GGGCTTCCTCTTCGCCCGGGTGGCGTTGGGCCCGCGCGGGCGCTCGGGTGACTGCAGCTGCTCAGCTCCC | 76 |
| NM_004496.3 | CTCCCCCGCCCCGCGCCGCGCGGCCGCCCGTCGCTTCGCACAGGGCTGGATGGTTGTATTGGGCAGGGTG | |
| | GCTCCAGGATGTTAGGAACTGTGAAGATGGAAGGGCATGAAACCAGCGACTGGAACAGCTACTACGCAGA | |
| | CACGCAGGAGGCCTACTCCTCCGTCCCGGTCAGCAACATGAACTCAGGCCTGGGCTCCATGAACTCCATG | |
| | AACACCTACATGACCATGAACACCATGACTACGAGCGGCAACATGACCCCGGCGTCCTTCAACATGTCCT | |
| | ATGCCAACCCGGGCCTAGGGGCCGGCCTGAGTCCCGGCGCAGTAGCCGGCATGCCGGGGGGCTCGGCGGG | |
| | CGCCATGAACAGCATGACTGCGGCCGGCGTGACGGCCATGGGTACGGCGCTGAGCCCGAGCGGCATGGGC | |
| | GCCATGGGTGCGCAGCAGGCGGCCTCCATGAATGGCCTGGGCCCCTACGCGGCCGCCATGAACCCGTGCA | |
| | TGAGCCCCATGGCGTACGCGCCGTCCAACCTGGGCCGCAGCCGCGCGGGCGGCGGCGGCGACGCCAAGAC | |
| | GTTCAAGCGCAGCTACCCGCACGCCAAGCCGCCCTACTCGTACATCTCGCTCATCACCATGGCCATCCAG | |
| | CAGGCGCCCAGCAAGATGCTCACGCTGAGCGAGATCTACCAGTGGATCATGGACCTCTTCCCCTATTACC | |
| | GGCAGAACCAGCAGCGCTGGCAGAACTCCATCCGCCACTCGCTGTCCTTCAATGACTGCTTCGTCAAGGT | |
| | GGCACGCTCCCCGGACAAGCCGGGCAAGGGCTCCTACTGGACGCTGCACCCGGACTCCGGCAACATGTTC | |
| | GAGAACGGCTGCTACTTGCGCCGCCAGAAGCGCTTCAAGTGCGAGAAGCAGCCGGGGGCCGGCGGCGGGG | |
| | GCGGGAGCGGAAGCGGGGGCAGCGGCGCCAAGGGCGGCCCTGAGAGCCGCAAGGACCCCTCTGGCGCCTC | |
| | TAACCCCAGCGCCGACTCGCCCCTCCATCGGGGTGTGCACGGGAAGACCGGCCAGCTAGAGGGCGCGCCG | |
| | GCCCCCGGGCCCGCCGCCAGCCCCCAGACTCTGGACCACAGTGGGGCGACGGCGACAGGGGGCGCCTCGG | |
| | AGTTGAAGACTCCAGCCTCCTCAACTGCGCCCCCCATAAGCTCCGGGCCCGGGGCGCTGGCCTCTGTGCC | |
| | CGCCTCTCACCCGGCACACGGCTTGGCACCCCACGAGTCCCAGCTGCACCTGAAAGGGGACCCCCACTAC | |
| | TCCTTCAACCACCCGTTCTCCATCAACAACCTCATGTCCTCCTCGGAGCAGCAGCATAAGCTGGACTTCA | |
| | AGGCATACGAACAGGCACTGCAATACTCGCCTTACGGCTCTACGTTGCCCGCCAGCCTGCCTCTAGGCAG | |
| | CGCCTCGGTGACCACCAGGAGCCCCATCGAGCCCTCAGCCCTGGAGCCGGCGTACTACCAAGGTGTGTAT | |
| | TCCAGACCCGTCCTAAACACTTCCTAGCTCCCGGGACTGGGGGGTTTGTCTGGCATAGCCATGCTGGTAG | |
| | CAAGAGAGAAAAAATCAACAGCAAACAAAACCACACAAACCAAACCGTCAACAGCATAATAAAATCCCAA | |
| | CAACTATTTTTATTTCATTTTTCATGCACAACCTTTCCCCCAGTGCAAAAGACTGTTACTTTATTATTGT | |
| | ATTCAAAATTCATTGTGTATATTACTACAAAGACAACCCCAAACCAATTTTTTTCCTGCGAAGTTTAATG | |
| | ATCCACAAGTGTATATATGAAATTCTCCTCCTTCCTTGCCCCCCTCTCTTTCTTCCCTCTTTCCCCTCCA | |
| | GACATTCTAGTTTGTGGAGGGTTATTTAAAAAAACAAAAAAGGAAGATGGTCAAGTTTGTAAAATATTTG | |
| | TTTGTGCTTTTTCCCCCTCCTTACCTGACCCCCTACGAGTTTACAGGTCTGTGGCAATACTCTTAACCAT | |
| | AAGAATTGAAATGGTGAAGAAACAAGTATACACTAGAGGCTCTTAAAAGTATTGAAAGACAATACTGCTG | |
| | TTATATAGCAAGACATAAACAGATTATAAACATCAGAGCCATTTGCTTCTCAGTTTACATTTCTGATACA | |
| | TGCAGATAGCAGATGTCTTTAAATGAAATACATGTATATTGTGTATGGACTTAATTATGCACATGCTCAG | |
| | ATGTGTAGACATCCTCCGTATATTTACATAACATATAGAGGTAATAGATAGGTGATATACATGATACATT | |
| | CTCAAGAGTTGCTTGACCGAAAGTTACAAGGACCCCAACCCCTTTGTCCTCTCTACCCACAGATGGCCCT | |
| | GGGAATCAATTCCTCAGGAATTGCCCTCAAGAACTCTGCTTCTTGCTTTGCAGAGTGCCATGGTCATGTC | |
| | ATTCTGAGGTCACATAACACATAAAATTAGTTTCTATGAGTGTATACCATTTAAAGAATTTTTTTTTCAG | |
| | TAAAAGGGAATATTACAATGTTGGAGGAGAGATAAGTTATAGGGAGCTGGATTTCAAAACGTGGTCCAAG | |
| | ATTCAAAAATCCTATTGATAGTGGCCATTTTAATCATTGCCATCGTGTGCTTGTTTCATCCAGTGTTATG | |
| | CACTTTCCACAGTTGGACATGGTGTTAGTATAGCCAGACGGGTTTCATTATTATTTCTCTTTGCTTTCTC | |
| | AATGTTAATTTATTGCATGGTTTATTCTTTTTCTTTACAGCTGAAATTGCTTTAAATGATGGTTAAAATT | |
| | ACAAATTAAATTGTTAATTTTTATCAATGTGATTGTAATTAAAAATATTTTGATTTAAATAACAAAAATA | |
| | ATACCAGATTTTAAGCCGTGGAAAATGTTCTTGATCATTTGCAGTTAAGGACTTTAAATAAATCAAATGT | |
| | TAACAAAAGAGCATTTCTGTTATTTTTTTTCACTTAACTAAATCCGAAGTGAATATTTCTGAATACGATA | |
| | TTTTTCAAATTCTAGAACTGAATATAAATGACAAAAATGAAAATAAAATTGTTTTGTCTGTTGTTATAAT | |
| | GAATGTGTAGCTAGTAAAAAGGAGTGAAAGAAATTCAAGTAAAGTGTATAAGTTGATTTAATATTCCAAG | |
| | AGTTGAGATTTTTAAGATTCTTTATTCCCAGTGATGTTTACTTCATTTTTTTTTTTTTTTTTGACACCGG | |
| | CTTAAGCCTTCTGTGTTTCCTTTGAGCCTTTTCACTACAAAATCAAATATTAATTTAACTACCTTTCCTC | |
| | CTTCCCCAATGTATCACTTTTCTTTATCTGAGAATTCTTCCAATGAAAATAAAATATCAGCTGTGGCTGA | |
| | TAGAATTAAGTTGTGTCCAAAAAAAAAAAAAAAAAA | |
| GATA3 | GGCGCCGTCTTGATACTTTCAGAAAGAATGCATTCCCTGTAAAAAAAAAAAAAAAATACTGAGAGAGGGA | 77 |
| NM_001002295.1 | GAGAGAGAGAGAAGAAGAGAGAGAGACGGAGGGAGAGCGAGACAGAGCGAGCAACGCAATCTGACCGAGC | |
| | AGGTCGTACGCCGCCGCCTCCTCCTCCTCTCTGCTCTTCGCTACCCAGGTGACCCGAGGAGGGACTCCGC | |
| | CTCCGAGCGGCTGAGGACCCCGGTGCAGAGGAGCCTGGCTCGCAGAATTGCAGAGTCGTCGCCCCTTTTT | |
| | ACAACCTGGTCCCGTTTTATTCTGCCGTACCCAGTTTTTGGATTTTTGTCTTCCCCTTCTTCTCTTTGCT | |
| | AAACGACCCCTCCAAGATAATTTTTAAAAAACCTTCTCCTTTGCTCACCTTTGCTTCCCAGCCTTCCCAT | |
| | CCCCCCACCGAAAGCAAATCATTCAACGACCCCCGACCCTCCGACGGCAGGAGCCCCCCGACCTCCCAGG | |
| | CGGACCGCCCTCCCTCCCCGCGCGCGGGTTCCGGGCCCGGCGAGAGGGCGCGAGCACAGCCGAGGCCATG | |
| | GAGGTGACGGCGGACCAGCCGCGCTGGGTGAGCCACCACCACCCCGCCGTGCTCAACGGGCAGCACCCGG | |
| | ACACGCACCACCCGGGCCTCAGCCACTCCTACATGGACGCGGCGCAGTACCCGCTGCCGGAGGAGGTGGA | |
| | TGTGCTTTTTAACATCGACGGTCAAGGCAACCACGTCCCGCCCTACTACGGAAACTCGGTCAGGGCCACG | |
| | GTGCAGAGGTACCCTCCGACCCACCACGGGAGCCAGGTGTGCCGCCCGCCTCTGCTTCATGGATCCCTAC | |
| | CCTGGCTGGACGGCGGCAAAGCCCTGGGCAGCCACCACACCGCCTCCCCCTGGAATCTCAGCCCCTTCTC | |
| | CAAGACGTCCATCCACCACGGCTCCCCGGGGCCCCTCTCCGTCTACCCCCCGGCCTCGTCCTCCTCCTTG | |
| | TCGGGGGGCCACGCCAGCCCGCACCTCTTCACCTTCCCGCCCACCCCGCCGAAGGACGTCTCCCCGGACC | |
| | CATCGCTGTCCACCCCAGGCTCGGCCGGCTCGGCCCGGCAGGACGAGAAAGAGTGCCTCAAGTACCAGGT | |
| | GCCCCTGCCCGACAGCATGAAGCTGGAGTCGTCCCACTCCCGTGGCAGCATGACCGCCCTGGGTGGAGCC | |
| | TCCTCGTCGACCCACCACCCCATCACCACCTACCCGCCCTACGTGCCCGAGTACAGCTCCGGACTCTTCC | |
| | CCCCCAGCAGCCTGCTGGGCGGCTCCCCCACCGGCTTCGGATGCAAGTCCAGGCCCAAGGCCCGGTCCAG | |
| | CACAGAAGGCAGGGAGTGTGTGAACTGTGGGGCAACCTCGACCCCACTGTGGCGGCGAGATGGCACGGGA | |
| | CACTACCTGTGCAACGCCTGCGGGCTCTATCACAAAATGAACGGACAGAACCGGCCCCTCATTAAGCCCA | |
| | AGCGAAGGCTGTCTGCAGCCAGGAGAGCAGGGACGTCCTGTGCGAACTGTCAGACCACCACAACCACACT | |
| | CTGGAGGAGGAATGCCAATGGGGACCCTGTCTGCAATGCCTGTGGGCTCTACTACAAGCTTCACAATATT | |
| | AACAGACCCCTGACTATGAAGAAGGAAGGCATCCAGACCAGAAACCGAAAAATGTCTAGCAAATCCAAAA | |
| | AGTGCAAAAAAGTGCATGACTCACTGGAGGACTTCCCCAAGAACAGCTCGTTTAACCCGGCCGCCCTCTC | |
| | CAGACACATGTCCTCCCTGAGCCACATCTCGCCCTTCAGCCACTCCAGCCACATGCTGACCACGCCCACG | |
| | CCGATGCACCCGCCATCCAGCCTGTCCTTTGGACCACACCACCCCTCCAGCATGGTCACCGCCATGGGTT | |
| | AGAGCCCTGCTCGATGCTCACAGGGCCCCCAGCGAGAGTCCCTGCAGTCCCTTTCGACTTGCATTTTTGC | |
| | AGGAGCAGTATCATGAAGCCTAAACGCGATGGATATATGTTTTTGAAGGCAGAAAGCAAAATTATGTTTG | |
| | CCACTTTGCAAAGGAGCTCACTGTGGTGTCTGTGTTCCAACCACTGAATCTGGACCCCATCTGTGAATAA | |
| | GCCATTCTGACTCATATCCCCTATTTAACAGGGTCTCTAGTGCTGTGAAAAAAAAAATGCTGAACATTGC | |
| | ATATAACTTATATTGTAAGAAATACTGTACAATGACTTTATTGCATCTGGGTAGCTGTAAGGCATGAAGG | |
| | ATGCCAAGAAGTTTAAGGAATATGGGAGAAATAGTGTGGAAATTAAGAAGAAACTAGGTCTGATATTCAA | |
| | ATGGACAAACTGCCAGTTTTGTTTCCTTTCACTGGCCACAGTTGTTTGATGCATTAAAAGAAAATAAAAA | |
| | AAAGAAAAAAGAGAAAAGAAAAAAAAAGAAAAAAGTTGTAGGCGAATCATTTGTTCAAAGCTGTTGGCCT | |
| | CTGCAAAGGAAATACCAGTTCTGGGCAATCAGTGTTACCGTTCACCAGTTGCCGTTGAGGGTTTCAGAGA | |
| | GCCTTTTTCTAGGCCTACATGCTTTGTGAACAAGTCCCTGTAATTGTTGTTTGTATGTATAATTCAAAGC | |
| | ACCAAAATAAGAAAAGATGTAGATTTATTTCATCATATTATACAGACCGAACTGTTGTATAAATTTATTT | |
| | ACTGCTAGTCTTAAGAACTGCTTTCTTTCGTTTGTTTGTTTCAATATTTTCCTTCTCTCTCAATTTTTGG | |
| | TTGAATAAACTAGATTACATTCAGTTGGCCTAAGGTGGTTGTGCTCGGAGGGTTTCTTGTTTCTTTTCCA | |
| | TTTTGTTTTTGGATGATATTTATTAAATAGCTTCTAAGAGTCCGGCGGCATCTGTCTTGTCCCTATTCCT | |
| | GCAGCCTGTGCTGAGGGTAGCAGTGTATGAGCTACCAGCGTGCATGTCAGCGACCCTGGCCCGACAGGCC | |
| | ACGTCCTGCAATCGGCCCGGCTGCCTCTTCGCCCTGTCGTGTTCTGTGTTAGTGATCACTGCCTTTAATA | |
| | CAGTCTGTTGGAATAATATTATAAGCATAATAATAAAGTGAAAATATTTTAAAACTACAA | |
| CDCA1 | GGCACGAGGGCAAGTTTGAAAAGTGATGACGGTTGACGTTTGCTGATTTTTGACTTTGCTTGTAGCTGCT | 78 |
| AF326731.1 | CCCCGAACTCGCCGTCTTCCTGTCGGCGGCCGGCACTGTAGATTAACAGGAAACTTCCAAGATGGAAACT | |
| | TTGTCTTTCCCCAGATATAATGTAGCTGAGATTGTGATTCATATTCGCAATAAGATCTTAACAGGAGCTG | |
| | ATGGTAAAAACCTCACCAAGAATGATCTTTATCCAAATCCAAAGCCTGAAGTCTTGCACATGATCTACAT | |
| | GAGAGCCTTACAAATAGTATATGGAATTCGACTGGAACATTTTTACATGATGCCAGTGAACTCTGAAGTC | |
| | ATGTATCCACATTTAATGGAAGGCTTCTTACCATTCAGCAATTTAGTTACTCATCTGGACTCATTTTTGC | |
| | CTATCTGCCGGGTGAATGACTTTGAGACTGCTGATATTCTATGTCCAAAAGCAAAACGGACAAGTCGGTT | |
| | TTTAAGTGGCATTATCAACTTTATTCACTTCAGAGAAGCATGCCGTGAAACGTATATGGAATTTCTTTGG | |
| | CAATATAAATCCTCTGCGGACAAAATGCAACAGTTAAACGCCGCACACCAGGAGGCATTAATGAAACTGG | |
| | AGAGACTTGATTCTGTTCCAGTTGAAGAGCAAGAAGAGTTCAAGCAGCTTTCAGATGGTATTCAGGAGCT | |
| | ACAACAATCACTAAATCAGGATTTTCATCAAAAAACGATAGTGCTGCAAGAGGGAAATTCCCAAAAGAAG | |
| | TCAAATATTTCAGAGAAAACCAAGCGTTTGAATGAACTAAAATTGTTGGTGGTTTCTTTGAAAGAAATAC | |
| | AAGAGAGTTTGAAAACAAAAATTGTGGATTCTCCAGAGAAGTTAAAGAATTATAAAGAAAAAATGAAAGA | |
| | TACGGTCCAGAAGCTTAAAAATGCCAGACAAGAAGTGGTGGAGAAATATGAAATCTATGGAGACTCAGTT | |
| | GACTGCCTGCCTTCATGTCAGTTGGAAGTGCAGTTATATCAAAAGAAAATACAGGACCTTTCAGATAATA | |
| | GGGAAAAATTAGCCAGTATCTTAAAGGAGAGCCTGAACTTGGAGGACCAAATTGAGAGTGATGAGTCAGA | |
| | ACTGAAGAAATTGAAGACTGAAGAAAATTCGTTCAAAAGACTGATGATTGTGAAGAAGGAAAAACTTGCC | |
| | ACAGCACAATTCAAAATAAATAAGAAGCATGAAGATGTTAAGCAATACAAACGCACAGTAATTGAGGATT | |
| | GCAATAAAGTTCAAGAAAAAAGAGGTGCTGTCTATGAACGAGTAACCACAATTAATCAAGAAATCCAAAA | |
| | AATTAAACTTGGAATTCAACAACTAAAAGATGCTGCTGAAAGGGAGAAACTGAAGTCCCAGGAAATATTT | |
| | CTAAACTTGAAAACTGCTTTGGAGAAATACCACGACGGTATTGAAAAGGCAGCAGAGGACTCCTATGCTA | |
| | AGATAGATGAGAAGACAGCTGAACTGAAGAGGAAGATGTTCAAAATGTCAACCTGATTAACAAAATTACA | |
| | TGTCTTTTTGTAAATGGCTTGCCATCTTTTAATTTTCTATTTAGAAAGAAAAGTTGAAGCGAATGGAAGT | |
| | ATCAGAAGTACCAAATAATGTTGGCTTCATCAGTTTTTATACACTCTCATAAGTAGTTAATAAGATGAAT | |
| | TTAATGTAGGCTTTTATTAATTTATAATTAAAATAACTTGTGCAGCTATTCATGTCTCTACTCTGCCCCT | |
| | TGTTGTAAATAGTTTGAGTAAAACAAAACTAGTTACCTTTGAAATATATATATTTTTTTCTGTTAAAAAA | |
| | AAAAAAAAAAAAAAAA | |
| AGR2 | AATCACTTGGGGAAAGGAAGGTTCGTTTCTGAGTTAGCAACAAGTAAATGCAGCACTAGTGGGTGGGATT | 79 |
| NM_006408.3 | GAGGTATGCCCTGGTGCATAAATAGAGACTCAGCTGTGCTGGCACACTCAGAAGCTTGGACCGCATCCTA | |
| | GCCGCCGACTCACACAAGGCAGGTGGGTGAGGAAATCCAGAGTTGCCATGGAGAAAATTCCAGTGTCAGC | |
| | ATTCTTGCTCCTTGTGGCCCTCTCCTACACTCTGGCCAGAGATACCACAGTCAAACCTGGAGCCAAAAAG | |
| | GACACAAAGGACTCTCGACCCAAACTGCCCCAGACCCTCTCCAGAGGTTGGGGTGACCAACTCATCTGGA | |
| | CTCAGACATATGAAGAAGCTCTATATAAATCCAAGACAAGCAACAAACCCTTGATGATTATTCATCACTT | |
| | GGATGAGTGCCCACACAGTCAAGCTTTAAAGAAAGTGTTTGCTGAAAATAAAGAAATCCAGAAATTGGCA | |
| | GAGCAGTTTGTCCTCCTCAATCTGGTTTATGAAACAACTGACAAACACCTTTCTCCTGATGGCCAGTATG | |
| | TCCCCAGGATTATGTTTGTTGACCCATCTCTGACAGTTAGAGCCGATATCACTGGAAGATATTCAAATCG | |
| | TCTCTATGCTTACGAACCTGCAGATACAGCTCTGTTGCTTGACAACATGAAGAAAGCTCTCAAGTTGCTG | |
| | AAGACTGAATTGTAAAGAAAAAAAATCTCCAAGCCCTTCTGTCTGTCAGGCCTTGAGACTTGAAACCAGA | |
| | AGAAGTGTGAGAAGACTGGCTAGTGTGGAAGCATAGTGAACACACTGATTAGGTTATGGTTTAATGTTAC | |
| | AACAACTATTTTTTAAGAAAAACAAGTTTTAGAAATTTGGTTTCAAGTGTACATGTGTGAAAACAATATT | |
| | GTATACTACCATAGTGAGCCATGATTTTCTAAAAAAAAAAATAAATGTTTTGGGGGTGTTCTGTTTTCTC | |
| | CAAAAAAAAAAAAAAA | |
| ESR1 | AGGAGCTGGCGGAGGGCGTTCGTCCTGGGACTGCACTTGCTCCCGTCGGGTCGCCCGGCTTCACCGGACC | 80 |
| NM_000125.3 | CGCAGGCTCCCGGGGCAGGGCCGGGGCCAGAGCTCGCGTGTCGGCGGGACATGCGCTGCGTCGCCTCTAA | |
| | CCTCGGGCTGTGCTCTTTTTCCAGGTGGCCCGCCGGTTTCTGAGCCTTCTGCCCTGCGGGGACACGGTCT | |
| | GCACCCTGCCCGCGGCCACGGACCATGACCATGACCCTCCACACCAAAGCATCTGGGATGGCCCTACTGC | |
| | ATCAGATCCAAGGGAACGAGCTGGAGCCCCTGAACCGTCCGCAGCTCAAGATCCCCCTGGAGCGGCCCCT | |
| | GGGCGAGGTGTACCTGGACAGCAGCAAGCCCGCCGTGTACAACTACCCCGAGGGCGCCGCCTACGAGTTC | |
| | AACGCCGCGGCCGCCGCCAACGCGCAGGTCTACGGTCAGACCGGCCTCCCCTACGGCCCCGGGTCTGAGG | |
| | CTGCGGCGTTCGGCTCCAACGGCCTGGGGGGTTTCCCCCCACTCAACAGCGTGTCTCCGAGCCCGCTGAT | |
| | GCTACTGCACCCGCCGCCGCAGCTGTCGCCTTTCCTGCAGCCCCACGGCCAGCAGGTGCCCTACTACCTG | |
| | GAGAACGAGCCCAGCGGCTACACGGTGCGCGAGGCCGGCCCGCCGGCATTCTACAGGCCAAATTCAGATA | |
| | ATCGACGCCAGGGTGGCAGAGAAAGATTGGCCAGTACCAATGACAAGGGAAGTATGGCTATGGAATCTGC | |
| | CAAGGAGACTCGCTACTGTGCAGTGTGCAATGACTATGCTTCAGGCTACCATTATGGAGTCTGGTCCTGT | |
| | GAGGGCTGCAAGGCCTTCTTCAAGAGAAGTATTCAAGGACATAACGACTATATGTGTCCAGCCACCAACC | |
| | AGTGCACCATTGATAAAAACAGGAGGAAGAGCTGCCAGGCCTGCCGGCTCCGCAAATGCTACGAAGTGGG | |
| | AATGATGAAAGGTGGGATACGAAAAGACCGAAGAGGAGGGAGAATGTTGAAACACAAGCGCCAGAGAGAT | |
| | GATGGGGAGGGCAGGGGTGAAGTGGGGTCTGCTGGAGACATGAGAGCTGCCAACCTTTGGCCAAGCCCGC | |
| | TCATGATCAAACGCTCTAAGAAGAACAGCCTGGCCTTGTCCCTGACGGCCGACCAGATGGTCAGTGCCTT | |
| | GTTGGATGCTGAGCCCCCCATACTCTATTCCGAGTATGATCCTACCAGACCCTTCAGTGAAGCTTCGATG | |
| | ATGGGCTTACTGACCAACCTGGCAGACAGGGAGCTGGTTCACATGATCAACTGGGCGAAGAGGGTGCCAG | |
| | GCTTTGTGGATTTGACCCTCCATGATCAGGTCCACCTTCTAGAATGTGCCTGGCTAGAGATCCTGATGAT | |
| | TGGTCTCGTCTGGCGCTCCATGGAGCACCCAGGGAAGCTACTGTTTGCTCCTAACTTGCTCTTGGACAGG | |
| | AACCAGGGAAAATGTGTAGAGGGCATGGTGGAGATCTTCGACATGCTGCTGGCTACATCATCTCGGTTCC | |
| | GCATGATGAATCTGCAGGGAGAGGAGTTTGTGTGCCTCAAATCTATTATTTTGCTTAATTCTGGAGTGTA | |
| | CACATTTCTGTCCAGCACCCTGAAGTCTCTGGAAGAGAAGGACCATATCCACCGAGTCCTGGACAAGATC | |
| | ACAGACACTTTGATCCACCTGATGGCCAAGGCAGGCCTGACCCTGCAGCAGCAGCACCAGCGGCTGGCCC | |
| | AGCTCCTCCTCATCCTCTCCCACATCAGGCACATGAGTAACAAAGGCATGGAGCATCTGTACAGCATGAA | |
| | GTGCAAGAACGTGGTGCCCCTCTATGACCTGCTGCTGGAGATGCTGGACGCCCACCGCCTACATGCGCCC | |
| | ACTAGCCGTGGAGGGGCATCCGTGGAGGAGACGGACCAAAGCCACTTGGCCACTGCGGGCTCTACTTCAT | |
| | CGCATTCCTTGCAAAAGTATTACATCACGGGGGAGGCAGAGGGTTTCCCTGCCACGGTCTGAGAGCTCCC | |
| | TGGCTCCCACACGGTTCAGATAATCCCTGCTGCATTTTACCCTCATCATGCACCACTTTAGCCAAATTCT | |
| | GTCTCCTGCATACACTCCGGCATGCATCCAACACCAATGGCTTTCTAGATGAGTGGCCATTCATTTGCTT | |
| | GCTCAGTTCTTAGTGGCACATCTTCTGTCTTCTGTTGGGAACAGCCAAAGGGATTCCAAGGCTAAATCTT | |
| | TGTAACAGCTCTCTTTCCCCCTTGCTATGTTACTAAGCGTGAGGATTCCCGTAGCTCTTCACAGCTGAAC | |
| | TCAGTCTATGGGTTGGGGCTCAGATAACTCTGTGCATTTAAGCTACTTGTAGAGACCCAGGCCTGGAGAG | |
| | TAGACATTTTGCCTCTGATAAGCACTTTTTAAATGGCTCTAAGAATAAGCCACAGCAAAGAATTTAAAGT | |
| | GGCTCCTTTAATTGGTGACTTGGAGAAAGCTAGGTCAAGGGTTTATTATAGCACCCTCTTGTATTCCTAT | |
| | GGCAATGCATCCTTTTATGAAAGTGGTACACCTTAAAGCTTTTATATGACTGTAGCAGAGTATCTGGTGA | |
| | TTGTCAATTCATTCCCCCTATAGGAATACAAGGGGCACACAGGGAAGGCAGATCCCCTAGTTGGCAAGAC | |
| | TATTTTAACTTGATACACTGCAGATTCAGATGTGCTGAAAGCTCTGCCTCTGGCTTTCCGGTCATGGGTT | |
| | CCAGTTAATTCATGCCTCCCATGGACCTATGGAGAGCAGCAAGTTGATCTTAGTTAAGTCTCCCTATATG | |
| | AGGGATAAGTTCCTGATTTTTGTTTTTATTTTTGTGTTACAAAAGAAAGCCCTCCCTCCCTGAACTTGCA | |
| | GTAAGGTCAGCTTCAGGACCTGTTCCAGTGGGCACTGTACTTGGATCTTCCCGGCGTGTGTGTGCCTTAC | |
| | ACAGGGGTGAACTGTTCACTGTGGTGATGCATGATGAGGGTAAATGGTAGTTGAAAGGAGCAGGGGCCCT | |
| | GGTGTTGCATTTAGCCCTGGGGCATGGAGCTGAACAGTACTTGTGCAGGATTGTTGTGGCTACTAGAGAA | |
| | CAAGAGGGAAAGTAGGGCAGAAACTGGATACAGTTCTGAGGCACAGCCAGACTTGCTCAGGGTGGCCCTG | |
| | CCACAGGCTGCAGCTACCTAGGAACATTCCTTGCAGACCCCGCATTGCCCTTTGGGGGTGCCCTGGGATC | |
| | CCTGGGGTAGTCCAGCTCTTCTTCATTTCCCAGCGTGGCCCTGGTTGGAAGAAGCAGCTGTCACAGCTGC | |
| | TGTAGACAGCTGTGTTCCTACAATTGGCCCAGCACCCTGGGGCACGGGAGAAGGGTGGGGACCGTTGCTG | |
| | TCACTACTCAGGCTGACTGGGGCCTGGTCAGATTACGTATGCCCTTGGTGGTTTAGAGATAATCCAAAAT | |
| | CAGGGTTTGGTTTGGGGAAGAAAATCCTCCCCCTTCCTCCCCCGCCCCGTTCCCTACCGCCTCCACTCCT | |
| | GCCAGCTCATTTCCTTCAATTTCCTTTGACCTATAGGCTAAAAAAGAAAGGCTCATTCCAGCCACAGGGC | |
| | AGCCTTCCCTGGGCCTTTGCTTCTCTAGCACAATTATGGGTTACTTCCTTTTTCTTAACAAAAAAGAATG | |
| | TTTGATTTCCTCTGGGTGACCTTATTGTCTGTAATTGAAACCCTATTGAGAGGTGATGTCTGTGTTAGCC | |
| | AATGACCCAGGTGAGCTGCTCGGGCTTCTCTTGGTATGTCTTGTTTGGAAAAGTGGATTTCATTCATTTC | |
| | TGATTGTCCAGTTAAGTGATCACCAAAGGACTGAGAATCTGGGAGGGCAAAAAAAAAAAAAAAGTTTTTA | |
| | TGTGCACTTAAATTTGGGGACAATTTTATGTATCTGTGTTAAGGATATGTTTAAGAACATAATTCTTTTG | |
| | TTGCTGTTTGTTTAAGAAGCACCTTAGTTTGTTTAAGAAGCACCTTATATAGTATAATATATATTTTTTT | |
| | GAAATTACATTGCTTGTTTATCAGACAATTGAATGTAGTAATTCTGTTCTGGATTTAATTTGACTGGGTT | |
| | AACATGCAAAAACCAAGGAAAAATATTTAGTTTTTTTTTTTTTTTTTGTATACTTTTCAAGCTACCTTGT | |
| | CATGTATACAGTCATTTATGCCTAAAGCCTGGTGATTATTCATTTAAATGAAGATCACATTTCATATCAA | |
| | CTTTTGTATCCACAGTAGACAAAATAGCACTAATCCAGATGCCTATTGTTGGATACTGAATGACAGACAA | |
| | TCTTATGTAGCAAAGATTATGCCTGAAAAGGAAAATTATTCAGGGCAGCTAATTTTGCTTTTACCAAAAT | |
| | ATCAGTAGTAATATTTTTGGACAGTAGCTAATGGGTCAGTGGGTTCTTTTTAATGTTTATACTTAGATTT | |
| | TCTTTTAAAAAAATTAAAATAAAACAAAAAAAAATTTCTAGGACTAGACGATGTAATACCAGCTAAAGCC | |
| | AAACAATTATACAGTGGAAGGTTTTACATTATTCATCCAATGTGTTTCTATTCATGTTAAGATACTACTA | |
| | CATTTGAAGTGGGCAGAGAACATCAGATGATTGAAATGTTCGCCCAGGGGTCTCCAGCAACTTTGGAAAT | |
| | CTCTTTGTATTTTTACTTGAAGTGCCACTAATGGACAGCAGATATTTTCTGGCTGATGTTGGTATTGGGT | |
| | GTAGGAACATGATTTAAAAAAAAACTCTTGCCTCTGCTTTCCCCCACTCTGAGGCAAGTTAAAATGTAAA | |
| | AGATGTGATTTATCTGGGGGGCTCAGGTATGGTGGGGAAGTGGATTCAGGAATCTGGGGAATGGCAAATA | |
| | TATTAAGAAGAGTATTGAAAGTATTTGGAGGAAAATGGTTAATTCTGGGTGTGCACCAGGGTTCAGTAGA | |
| | GTCCACTTCTGCCCTGGAGACCACAAATCAACTAGCTCCATTTACAGCCATTTCTAAAATGGCAGCTTCA | |
| | GTTCTAGAGAAGAAAGAACAACATCAGCAGTAAAGTCCATGGAATAGCTAGTGGTCTGTGTTTCTTTTCG | |
| | CCATTGCCTAGCTTGCCGTAATGATTCTATAATGCCATCATGCAGCAATTATGAGAGGCTAGGTCATCCA | |
| | AAGAGAAGACCCTATCAATGTAGGTTGCAAAATCTAACCCCTAAGGAAGTGCAGTCTTTGATTTGATTTC | |
| | CCTAGTAACCTTGCAGATATGTTTAACCAAGCCATAGCCCATGCCTTTTGAGGGCTGAACAAATAAGGGA | |
| | CTTACTGATAATTTACTTTTGATCACATTAAGGTGTTCTCACCTTGAAATCTTATACACTGAAATGGCCA | |
| | TTGATTTAGGCCACTGGCTTAGAGTACTCCTTCCCCTGCATGACACTGATTACAAATACTTTCCTATTCA | |
| | TACTTTCCAATTATGAGATGGACTGTGGGTACTGGGAGTGATCACTAACACCATAGTAATGTCTAATATT | |
| | CACAGGCAGATCTGCTTGGGGAAGCTAGTTATGTGAAAGGCAAATAGAGTCATACAGTAGCTCAAAAGGC | |
| | AACCATAATTCTCTTTGGTGCAGGTCTTGGGAGCGTGATCTAGATTACACTGCACCATTCCCAAGTTAAT | |
| | CCCCTGAAAACTTACTCTCAACTGGAGCAAATGAACTTTGGTCCCAAATATCCATCTTTTCAGTAGCGTT | |
| | AATTATGCTCTGTTTCCAACTGCATTTCCTTTCCAATTGAATTAAAGTGTGGCCTCGTTTTTAGTCATTT | |
| | AAAATTGTTTTCTAAGTAATTGCTGCCTCTATTATGGCACTTCAATTTTGCACTGTCTTTTGAGATTCAA | |
| | GAAAAATTTCTATTCTTTTTTTTGCATCCAATTGTGCCTGAACTTTTAAAATATGTAAATGCTGCCATGT | |
| | TCCAAACCCATCGTCAGTGTGTGTGTTTAGAGCTGTGCACCCTAGAAACAACATATTGTCCCATGAGCAG | |
| | GTGCCTGAGACACAGACCCCTTTGCATTCACAGAGAGGTCATTGGTTATAGAGACTTGAATTAATAAGTG | |
| | ACATTATGCCAGTTTCTGTTCTCTCACAGGTGATAAACAATGCTTTTTGTGCACTACATACTCTTCAGTG | |
| | TAGAGCTCTTGTTTTATGGGAAAAGGCTCAAATGCCAAATTGTGTTTGATGGATTAATATGCCCTTTTGC | |
| | CGATGCATACTATTACTGATGTGACTCGGTTTTGTCGCAGCTTTGCTTTGTTTAATGAAACACACTTGTA | |
| | AACCTCTTTTGCACTTTGAAAAAGAATCCAGCGGGATGCTCGAGCACCTGTAAACAATTTTCTCAACCTA | |
| | TTTGATGTTCAAATAAAGAATTAAACTAAA | |
| SCUBE2 | CCGCGCACACCTCCCCGCGCCGCCGCCGCCACCGCCCGCACTCCGCCGCCTCTGCCCGCAACCGCTGAGC | 81 |
| NM_020974.2 | CATCCATGGGGGTCGCGGGCCGCAACCGTCCCGGGGCGGCCTGGGCGGTGCTGCTGCTGCTGCTGCTGCT | |
| | GCCGCCACTGCTGCTGCTGGCGGGGGCCGTCCCGCCGGGTCGGGGCCGTGCCGCGGGGCCGCAGGAGGAT | |
| | GTAGATGAGTGTGCCCAAGGGCTAGATGACTGCCATGCCGACGCCCTGTGTCAGAACACACCCACCTCCT | |
| | ACAAGTGCTCCTGCAAGCCTGGCTACCAAGGGGAAGGCAGGCAGTGTGAGGACATCGATGAATGTGGAAA | |
| | TGAGCTCAATGGAGGCTGTGTCCATGACTGTTTGAATATTCCAGGCAATTATCGTTGCACTTGTTTTGAT | |
| | GGCTTCATGTTGGCTCATGACGGTCATAATTGTCTTGATGTGGACGAGTGCCTGGAGAACAATGGCGGCT | |
| | GCCAGCATACCTGTGTCAACGTCATGGGGAGCTATGAGTGCTGCTGCAAGGAGGGGTTTTTCCTGAGTGA | |
| | CAATCAGCACACCTGCATTCACCGCTCGGAAGAGGGCCTGAGCTGCATGAATAAGGATCACGGCTGTAGT | |
| | CACATCTGCAAGGAGGCCCCAAGGGGCAGCGTCGCCTGTGAGTGCAGGCCTGGTTTTGAGCTGGCCAAGA | |
| | ACCAGAGAGACTGCATCTTGACCTGTAACCATGGGAACGGTGGGTGCCAGCACTCCTGTGACGATACAGC | |
| | CGATGGCCCAGAGTGCAGCTGCCATCCACAGTACAAGATGCACACAGATGGGAGGAGCTGCCTTGAGCGA | |
| | GAGGACACTGTCCTGGAGGTGACAGAGAGCAACACCACATCAGTGGTGGATGGGGATAAACGGGTGAAAC | |
| | GGCGGCTGCTCATGGAAACGTGTGCTGTCAACAATGGAGGCTGTGACCGCACCTGTAAGGATACTTCGAC | |
| | AGGTGTCCACTGCAGTTGTCCTGTTGGATTCACTCTCCAGTTGGATGGGAAGACATGTAAAGATATTGAT | |
| | GAGTGCCAGACCCGCAATGGAGGTTGTGATCATTTCTGCAAAAACATCGTGGGCAGTTTTGACTGCGGCT | |
| | GCAAGAAAGGATTTAAATTATTAACAGATGAGAAGTCTTGCCAAGATGTGGATGAGTGCTCTTTGGATAG | |
| | GACCTGTGACCACAGCTGCATCAACCACCCTGGCACATTTGCTTGTGCTTGCAACCGAGGGTACACCCTG | |
| | TATGGCTTCACCCACTGTGGAGACACCAATGAGTGCAGCATCAACAACGGAGGCTGTCAGCAGGTCTGTG | |
| | TGAACACAGTGGGCAGCTATGAATGCCAGTGCCACCCTGGGTACAAGCTCCACTGGAATAAAAAAGACTG | |
| | TGTGGAAGTGAAGGGGCTCCTGCCCACAAGTGTGTCACCCCGTGTGTCCCTGCACTGCGGTAAGAGTGGT | |
| | GGAGGAGACGGGTGCTTCCTCAGATGTCACTCTGGCATTCACCTCTCTTCAGGACTGCAAGGGGCCTACT | |
| | CTGTCACCTGTGGCTCTTCCTCTCCTCTCAGGAACAAACAACAAAAATCAAATGACTCTGCTTTTGGGGA | |
| | TGTCACCACCATCAGGACAAGTGTAACCTTTAAGCTAAATGAAGGCAAGTGTAGTTTGAAAAATGCTGAG | |
| | CTGTTTCCCGAGGGTCTGCGACCAGCACTACCAGAGAAGCACAGCTCAGTAAAAGAGAGCTTCCGCTACG | |
| | TAAACCTTACATGCAGCTCTGGCAAGCAAGTCCCAGGAGCCCCTGGCCGACCAAGCACCCCTAAGGAAAT | |
| | GTTTATCACTGTTGAGTTTGAGCTTGAAACTAACCAAAAGGAGGTGACAGCTTCTTGTGACCTGAGCTGC | |
| | ATCGTAAAGCGAACCGAGAAGCGGCTCCGTAAAGCCATCCGCACGCTCAGAAAGGCCGTCCACAGGGAGC | |
| | AGTTTCACCTCCAGCTCTCAGGCATGAACCTCGACGTGGCTAAAAAGCCTCCCAGAACATCTGAACGCCA | |
| | GGCAGAGTCCTGTGGAGTGGGCCAGGGTCATGCAGAAAACCAATGTGGTCTGTGTCAACCTGGTGAATAT | |
| | TCTGCAGATGGCTTTGCACCTTGCCAGCTCTGTGCCCTGGGCACGTTCCAGCCTGAAGCTGGTCGAACTT | |
| | CCTGCTTCCCCTGTGGAGGAGGCCTTGCCACCAAACATCAGGGAGCTACTTCCTTTCAGGACTGTGAAAC | |
| | CAGAGTTCAATGTTCACCTGGACATTTCTACAACACCACCACTCACCGATGTATTCGTTGCCCAGTGGGA | |
| | ACATACCAGCCTGAATTTGGAAAAAATAATTGTGTTTCTTGCCCAGGAAATACTACGACTGACTTTGATG | |
| | GCTCCACAAACATAACCCAGTGTAAAAACAGAAGATGTGGAGGGGAGCTGGGAGATTTCACTGGGTACAT | |
| | TGAATCCCCAAACTACCCAGGCAATTACCCAGCCAACACCGAGTGTACGTGGACCATCAACCCACCCCCC | |
| | AAGCGCCGCATCCTGATCGTGGTCCCTGAGATCTTCCTGCCCATAGAGGACGACTGTGGGGACTATCTGG | |
| | TGATGCGGAAAACCTCTTCATCCAATTCTGTGACAACATATGAAACCTGCCAGACCTACGAACGCCCCAT | |
| | CGCCTTCACCTCCAGGTCAAAGAAGCTGTGGATTCAGTTCAAGTCCAATGAAGGGAACAGCGCTAGAGGG | |
| | TTCCAGGTCCCATACGTGACATATGATGAGGACTACCAGGAACTCATTGAAGACATAGTTCGAGATGGCA | |
| | GGCTCTATGCATCTGAGAACCATCAGGAAATACTTAAGGATAAGAAACTTATCAAGGCTCTGTTTGATGT | |
| | CCTGGCCCATCCCCAGAACTATTTCAAGTACACAGCCCAGGAGTCCCGAGAGATGTTTCCAAGATCGTTC | |
| | ATCCGATTGCTACGTTCCAAAGTGTCCAGGTTTTTGAGACCTTACAAATGACTCAGCCCACGTGCCACTC | |
| | AATACAAATGTTCTGCTATAGGGTTGGTGGGACAGAGCTGTCTTCCTTCTGCATGTCAGCACAGTCGGGT | |
| | ATTGCTGCCTCCCGTATCAGTGACTCATTAGAGTTCAATTTTTATAGATAATACAGATATTTTGGTAAAT | |
| | TGAACTTGGTTTTTCTTTCCCAGCATCGTGGATGTAGACTGAGAATGGCTTTGAGTGGCATCAGCTTCTC | |
| | ACTGCTGTGGGCGGATGTCTTGGATAGATCACGGGCTGGCTGAGCTGGACTTTGGTCAGCCTAGGTGAGA | |
| | CTCACCTGTCCTTCTGGGGTCTTACTCCTCCTCAAGGAGTCTGTAGTGGAAAGGAGGCCACAGAATAAGC | |
| | TGCTTATTCTGAAACTTCAGCTTCCTCTAGCCCGGCCCTCTCTAAGGGAGCCCTCTGCACTCGTGTGCAG | |
| | GCTCTGACCAGGCAGAACAGGCAAGAGGGGAGGGAAGGAGACCCCTGCAGGCTCCCTCCACCCACCTTGA | |
| | GACCTGGGAGGACTCAGTTTCTCCACAGCCTTCTCCAGCCTGTGTGATACAAGTTTGATCCCAGGAACTT | |
| | GAGTTCTAAGCAGTGCTCGTGAAAAAAAAAAGCAGAAAGAATTAGAAATAAATAAAAACTAAGCACTTCT | |
| | GGAGACATAATAATGTACATTTATTGCCAGCCTTCCTCGTTGCAAGCTTCCACCCTGCAGCAAATGCACT | |
| | ATGCTGACTCTCGCACCTTCAGCTGTGCCCTCTGACACTCTGCTGGCCATTGCCTGAGGGACTGGGGAGT | |
| | TCAGGTGAAATGTAATTTCCTCAGTGGATGAGAATCATCAATTGTCATGAAAAGGCGATTTCACCAACCC | |
| | TGAGTCGGTATTGCCAAGGGTTCTACTCCCCAAGTGGGCTTCCCATCACAAGGGATCTGAGGTCCAGGTG | |
| | GGTGTGGTGAGGCCCAGCCTGTCATGTATGCCTTCCTTCCCCAGTCTCAAATGTGAGAGACGGACTCTGC | |
| | TCCGTGGACATGAGCAGCCCCTTGAAGGGTGGTCTCATTCTCTAACAGTAACAGCACTGCCAGAAACACC | |
| | CCCTGAATGCCACACGATCATCTCACTTTGGGTCAGGCCAGCAGGGCCTCACGATCATTTCTTGAACTTG | |
| | AATTTTCAGTGTTATTGAATCTTTAAACATTTAAATCCCCAAGCAAAAATCTCATTACAGTGAATAAAAA | |
| | GGAATCCAATCAAACAAGCCACCACTTCCCTAATGGATGGACTACCTACAACTATAGTGTTTTGTTATTT | |
| | CAATAACAATTCTATGCACAGCCAATTCTCCATACCAAAGTACTAAAAAAATGTTTAACAAGCATTTTTG | |
| | AAGAAAACAAAGAGAACTTCATTATGGTTAAACTTGCTTTTCATCTCAGTGTTGCTTTTTTTAACCTGTT | |
| | AATAACATTGATTCTTAAAAAGTCCTAATCAAACTTCTTTATTTGGATGGGCCCTAAATATTCATTTTCA | |
| | GATTTCTCTTCAAAAGTTTGAACATCATCATTAAAAAAAAAATAGCATTAAAACAAAAAAAAAAAAAAAA | |
| BUB1 | GGCGCCCTGAAACGTTCGGCGAGCCGACTGCGGCTGCGCGGGGTATTCGAATCGGCGGCGGCTTCTAGTT | 82 |
| NM_004336.3 | TGCGGTTCAGGTTTGGCCGCTGCCGGCCAGCGTCCTCTGGCCATGGACACCCCGGAAAATGTCCTTCAGA | |
| | TGCTTGAAGCCCACATGCAGAGCTACAAGGGCAATGACCCTCTTGGTGAATGGGAAAGATACATACAGTG | |
| | GGTAGAAGAGAATTTTCCTGAGAATAAAGAATACTTGATAACTTTACTAGAACATTTAATGAAGGAATTT | |
| | TTAGATAAGAAGAAATACCACAATGACCCAAGATTCATCAGTTATTGTTTAAAATTTGCTGAGTACAACA | |
| | GTGACCTCCATCAATTTTTTGAGTTTCTGTACAACCATGGGATTGGAACCCTGTCATCCCCTCTGTACAT | |
| | TGCCTGGGCGGGGCATCTGGAAGCCCAAGGAGAGCTGCAGCATGCCAGTGCTGTCCTTCAGAGAGGAATT | |
| | CAAAACCAGGCTGAACCCAGAGAGTTCCTGCAACAACAATACAGGTTATTTCAGACACGCCTCACTGAAA | |
| | CCCATTTGCCAGCTCAAGCTAGAACCTCAGAACCTCTGCATAATGTTCAGGTTTTAAATCAAATGATAAC | |
| | ATCAAAATCAAATCCAGGAAATAACATGGCCTGCATTTCTAAGAATCAGGGTTCAGAGCTTTCTGGAGTG | |
| | ATATCTTCAGCTTGTGATAAAGAGTCAAATATGGAACGAAGAGTGATCACGATTTCTAAATCAGAATATT | |
| | CTGTGCACTCATCTTTGGCATCCAAAGTTGATGTTGAGCAGGTTGTTATGTATTGCAAGGAGAAGCTTAT | |
| | TCGTGGGGAATCAGAATTTTCCTTTGAAGAATTGAGAGCCCAGAAATACAATCAACGGAGAAAGCATGAG | |
| | CAATGGGTAAATGAAGACAGACATTATATGAAAAGGAAAGAAGCAAATGCTTTTGAAGAACAGCTATTAA | |
| | AACAGAAAATGGATGAACTTCATAAGAAGTTGCATCAGGTGGTGGAGACATCCCATGAGGATCTGCCCGC | |
| | TTCCCAGGAAAGGTCCGAGGTTAATCCAGCACGTATGGGGCCAAGTGTAGGCTCCCAGCAGGAACTGAGA | |
| | GCGCCATGTCTTCCAGTAACCTATCAGCAGACACCAGTGAACATGGAAAAGAACCCAAGAGAGGCACCTC | |
| | CTGTTGTTCCTCCTTTGGCAAATGCTATTTCTGCAGCTTTGGTGTCCCCAGCCACCAGCCAGAGCATTGC | |
| | TCCTCCTGTTCCTTTGAAAGCCCAGACAGTAACAGACTCCATGTTTGCAGTGGCCAGCAAAGATGCTGGA | |
| | TGTGTGAATAAGAGTACTCATGAATTCAAGCCACAGAGTGGAGCAGAGATCAAAGAAGGGTGTGAAACAC | |
| | ATAAGGTTGCCAACACAAGTTCTTTTCACACAACTCCAAACACATCACTGGGAATGGTTCAGGCAACGCC | |
| | ATCCAAAGTGCAGCCATCACCCACCGTGCACACAAAAGAAGCATTAGGTTTCATCATGAATATGTTTCAG | |
| | GCTCCTACACTTCCTGATATTTCTGATGACAAAGATGAATGGCAATCTCTAGATCAAAATGAAGATGCAT | |
| | TTGAAGCCCAGTTTCAAAAAAATGTAAGGTCATCTGGGGCTTGGGGAGTCAATAAGATCATCTCTTCTTT | |
| | GTCATCTGCTTTTCATGTGTTTGAAGATGGAAACAAAGAAAATTATGGATTACCACAGCCTAAAAATAAA | |
| | CCCACAGGAGCCAGGACCTTTGGAGAACGCTCTGTCAGCAGACTTCCTTCAAAACCAAAGGAGGAAGTGC | |
| | CTCATGCTGAAGAGTTTTTGGATGACTCAACTGTATGGGGTATTCGCTGCAACAAAACCCTGGCACCCAG | |
| | TCCTAAGAGCCCAGGAGACTTCACATCTGCTGCACAACTTGCGTCTACACCATTCCACAAGCTTCCAGTG | |
| | GAGTCAGTGCACATTTTAGAAGATAAAGAAAATGTGGTAGCAAAACAGTGTACCCAGGCGACTTTGGATT | |
| | CTTGTGAGGAAAACATGGTGGTGCCTTCAAGGGATGGAAAATTCAGTCCAATTCAAGAGAAAAGCCCAAA | |
| | ACAGGCCTTGTCGTCTCACATGTATTCAGCATCCTTACTTCGTCTGAGCCAGCCTGCTGCAGGTGGGGTA | |
| | CTTACCTGTGAGGCAGAGTTGGGCGTTGAGGCTTGCAGACTCACAGACACTGACGCTGCCATTGCAGAAG | |
| | ATCCACCAGATGCTATTGCTGGGCTCCAAGCAGAATGGATGCAGATGAGTTCACTTGGGACTGTTGATGC | |
| | TCCAAACTTCATTGTTGGGAACCCATGGGATGATAAGCTGATTTTCAAACTTTTATCTGGGCTTTCTAAA | |
| | CCAGTGAGTTCCTATCCAAATACTTTTGAATGGCAATGTAAACTTCCAGCCATCAAGCCCAAGACTGAAT | |
| | TTCAATTGGGTTCTAAGCTGGTCTATGTCCATCACCTTCTTGGAGAAGGAGCCTTTGCCCAGGTGTACGA | |
| | AGCTACCCAGGGAGATCTGAATGATGCTAAAAATAAACAGAAATTTGTTTTAAAGGTCCAAAAGCCTGCC | |
| | AACCCCTGGGAATTCTACATTGGGACCCAGTTGATGGAAAGACTAAAGCCATCTATGCAGCACATGTTTA | |
| | TGAAGTTCTATTCTGCCCACTTATTCCAGAATGGCAGTGTATTAGTAGGAGAGCTCTACAGCTATGGAAC | |
| | ATTATTAAATGCCATTAACCTCTATAAAAATACCCCTGAAAAAGTGATGCCTCAAGGTCTTGTCATCTCT | |
| | TTTGCTATGAGAATGCTTTACATGATTGAGCAAGTGCATGACTGTGAAATCATTCATGGAGACATTAAAC | |
| | CAGACAATTTCATACTTGGAAACGGATTTTTGGAACAGGATGATGAAGATGATTTATCTGCTGGCTTGGC | |
| | ACTGATTGACCTGGGTCAGAGTATAGATATGAAACTTTTTCCAAAAGGAACTATATTCACAGCAAAGTGT | |
| | GAAACATCTGGTTTTCAGTGTGTTGAGATGCTCAGCAACAAACCATGGAACTACCAGATCGATTACTTTG | |
| | GGGTTGCTGCAACAGTATATTGCATGCTCTTTGGCACTTACATGAAAGTGAAAAATGAAGGAGGAGAGTG | |
| | TAAGCCTGAAGGTCTTTTTAGAAGGCTTCCTCATTTGGATATGTGGAATGAATTTTTTCATGTTATGTTG | |
| | AATATTCCAGATTGTCATCATCTTCCATCTTTGGATTTGTTAAGGCAAAAGCTGAAGAAAGTATTTCAAC | |
| | AACACTATACTAACAAGATTAGGGCCCTACGTAATAGGCTAATTGTACTGCTCTTAGAATGTAAGCGTTC | |
| | ACGAAAATAAAATTTGGATATAGACAGTCCTTAAAAATCACACTGTAAATATGAATCTGCTCACTTTAAA | |
| | CCTGTTTTTTTTTCATTTATTGTTTATGTAAATGTTTGTTAAAAATAAATCCCATGGAATATTTCCATGT | |
| | AAAAAAAAA | |
| SLC39A6 | AGTCCTGGGCGAAGGGGGCGGTGGTTCCCCGCGGCGCTGCGCGCGGCGGTAATTAGTGATTGTCTTCCAG | 83 |
| NM_012319.3 | CTTCGCGAAGGCTAGGGGCGCGGCTGCCGGGTGGCTGCGCGGCGCTGCCCCCGGACCGAGGGGCAGCCAA | |
| | CCCAATGAAACCACCGCGTGTTCGCGCCTGGTAGAGATTTCTCGAAGACACCAGTGGGCCCGTTCCGAGC | |
| | CCTCTGGACCGCCCGTGTGGAACCAAACCTGCGCGCGTGGCCGGGCCGTGGGACAACGAGGCCGCGGAGA | |
| | CGAAGGCGCAATGGCGAGGAAGTTATCTGTAATCTTGATCCTGACCTTTGCCCTCTCTGTCACAAATCCC | |
| | CTTCATGAACTAAAAGCAGCTGCTTTCCCCCAGACCACTGAGAAAATTAGTCCGAATTGGGAATCTGGCA | |
| | TTAATGTTGACTTGGCAATTTCCACACGGCAATATCATCTACAACAGCTTTTCTACCGCTATGGAGAAAA | |
| | TAATTCTTTGTCAGTTGAAGGGTTCAGAAAATTACTTCAAAATATAGGCATAGATAAGATTAAAAGAATC | |
| | CATATACACCATGACCACGACCATCACTCAGACCACGAGCATCACTCAGACCATGAGCGTCACTCAGACC | |
| | ATGAGCATCACTCAGACCACGAGCATCACTCTGACCATGATCATCACTCTCACCATAATCATGCTGCTTC | |
| | TGGTAAAAATAAGCGAAAAGCTCTTTGCCCAGACCATGACTCAGATAGTTCAGGTAAAGATCCTAGAAAC | |
| | AGCCAGGGGAAAGGAGCTCACCGACCAGAACATGCCAGTGGTAGAAGGAATGTCAAGGACAGTGTTAGTG | |
| | CTAGTGAAGTGACCTCAACTGTGTACAACACTGTCTCTGAAGGAACTCACTTTCTAGAGACAATAGAGAC | |
| | TCCAAGACCTGGAAAACTCTTCCCCAAAGATGTAAGCAGCTCCACTCCACCCAGTGTCACATCAAAGAGC | |
| | CGGGTGAGCCGGCTGGCTGGTAGGAAAACAAATGAATCTGTGAGTGAGCCCCGAAAAGGCTTTATGTATT | |
| | CCAGAAACACAAATGAAAATCCTCAGGAGTGTTTCAATGCATCAAAGCTACTGACATCTCATGGCATGGG | |
| | CATCCAGGTTCCGCTGAATGCAACAGAGTTCAACTATCTCTGTCCAGCCATCATCAACCAAATTGATGCT | |
| | AGATCTTGTCTGATTCATACAAGTGAAAAGAAGGCTGAAATCCCTCCAAAGACCTATTCATTACAAATAG | |
| | CCTGGGTTGGTGGTTTTATAGCCATTTCCATCATCAGTTTCCTGTCTCTGCTGGGGGTTATCTTAGTGCC | |
| | TCTCATGAATCGGGTGTTTTTCAAATTTCTCCTGAGTTTCCTTGTGGCACTGGCCGTTGGGACTTTGAGT | |
| | GGTGATGCTTTTTTACACCTTCTTCCACATTCTCATGCAAGTCACCACCATAGTCATAGCCATGAAGAAC | |
| | CAGCAATGGAAATGAAAAGAGGACCACTTTTCAGTCATCTGTCTTCTCAAAACATAGAAGAAAGTGCCTA | |
| | TTTTGATTCCACGTGGAAGGGTCTAACAGCTCTAGGAGGCCTGTATTTCATGTTTCTTGTTGAACATGTC | |
| | CTCACATTGATCAAACAATTTAAAGATAAGAAGAAAAAGAATCAGAAGAAACCTGAAAATGATGATGATG | |
| | TGGAGATTAAGAAGCAGTTGTCCAAGTATGAATCTCAACTTTCAACAAATGAGGAGAAAGTAGATACAGA | |
| | TGATCGAACTGAAGGCTATTTACGAGCAGACTCACAAGAGCCCTCCCACTTTGATTCTCAGCAGCCTGCA | |
| | GTCTTGGAAGAAGAAGAGGTCATGATAGCTCATGCTCATCCACAGGAAGTCTACAATGAATATGTACCCA | |
| | GAGGGTGCAAGAATAAATGCCATTCACATTTCCACGATACACTCGGCCAGTCAGACGATCTCATTCACCA | |
| | CCATCATGACTACCATCATATTCTCCATCATCACCACCACCAAAACCACCATCCTCACAGTCACAGCCAG | |
| | CGCTACTCTCGGGAGGAGCTGAAAGATGCCGGCGTCGCCACTCTGGCCTGGATGGTGATAATGGGTGATG | |
| | GCCTGCACAATTTCAGCGATGGCCTAGCAATTGGTGCTGCTTTTACTGAAGGCTTATCAAGTGGTTTAAG | |
| | TACTTCTGTTGCTGTGTTCTGTCATGAGTTGCCTCATGAATTAGGTGACTTTGCTGTTCTACTAAAGGCT | |
| | GGCATGACCGTTAAGCAGGCTGTCCTTTATAATGCATTGTCAGCCATGCTGGCGTATCTTGGAATGGCAA | |
| | CAGGAATTTTCATTGGTCATTATGCTGAAAATGTTTCTATGTGGATATTTGCACTTACTGCTGGCTTATT | |
| | CATGTATGTTGCTCTGGTTGATATGGTACCTGAAATGCTGCACAATGATGCTAGTGACCATGGATGTAGC | |
| | CGCTGGGGGTATTTCTTTTTACAGAATGCTGGGATGCTTTTGGGTTTTGGAATTATGTTACTTATTTCCA | |
| | TATTTGAACATAAAATCGTGTTTCGTATAAATTTCTAGTTAAGGTTTAAATGCTAGAGTAGCTTAAAAAG | |
| | TTGTCATAGTTTCAGTAGGTCATAGGGAGATGAGTTTGTATGCTGTACTATGCAGCGTTTAAAGTTAGTG | |
| | GGTTTTGTGATTTTTGTATTGAATATTGCTGTCTGTTACAAAGTCAGTTAAAGGTACGTTTTAATATTTA | |
| | AGTTATTCTATCTTGGAGATAAAATCTGTATGTGCAATTCACCGGTATTACCAGTTTATTATGTAAACAA | |
| | GAGATTTGGCATGACATGTTCTGTATGTTTCAGGGAAAAATGTCTTTAATGCTTTTTCAAGAACTAACAC | |
| | AGTTATTCCTATACTGGATTTTAGGTCTCTGAAGAACTGCTGGTGTTTAGGAATAAGAATGTGCATGAAG | |
| | CCTAAAATACCAAGAAAGCTTATACTGAATTTAAGCAAAGAAATAAAGGAGAAAAGAGAAGAATCTGAGA | |
| | ATTGGGGAGGCATAGATTCTTATAAAAATCACAAAATTTGTTGTAAATTAGAGGGGAGAAATTTAGAATT | |
| | AAGTATAAAAAGGCAGAATTAGTATAGAGTACATTCATTAAACATTTTTGTCAGGATTATTTCCCGTAAA | |
| | AACGTAGTGAGCACTTTTCATATACTAATTTAGTTGTACATTTAACTTTGTATAATACAGAAATCTAAAT | |
| | ATATTTAATGAATTCAAGCAATATATCACTTGACCAAGAAATTGGAATTTCAAAATGTTCGTGCGGGTAT | |
| | ATACCAGATGAGTACAGTGAGTAGTTTTATGTATCACCAGACTGGGTTATTGCCAAGTTATATATCACCA | |
| | AAAGCTGTATGACTGGATGTTCTGGTTACCTGGTTTACAAAATTATCAGAGTAGTAAAACTTTGATATAT | |
| | ATGAGGATATTAAAACTACACTAAGTATCATTTGATTCGATTCAGAAAGTACTTTGATATCTCTCAGTGC | |
| | TTCAGTGCTATCATTGTGAGCAATTGTCTTTTATATACGGTACTGTAGCCATACTAGGCCTGTCTGTGGC | |
| | ATTCTCTAGATGTTTCTTTTTTACACAATAAATTCCTTATATCAGCTTGAAAAAAAAAAAAAAAAAA | |
| UGT8 | AAGCCAACCTCGCTCAGCGGACGACTGGCCGGATCCCAACGCGCTGCCCCTTGCCCAGCCTGCGAGCGCG | 84 |
| NM_001128174.1 | TGGTACGAAGGCGCGTCTGCATCCATGCCCCAGCCCGGGGAGCTGGAGGCGCTCGCAGTCAGAGGCGAGT | |
| | GATGCTAGGCTGAGCGCGTGGCGGCCCGTGTCGTGCCCCGCTGAGCCAAGTGCGGAAGGGCAGCGGCGCG | |
| | CTCCGACTCTGCTCGCCGCACGCAGGGCGGGGCGCGGCTGGGGGGCGGGGGGCCTGGCCGCCCGCTGGGA | |
| | GCTGCGGACGAGCAGGCGCGCTGAGGACCCGAGGGAGGACACGGTTAAAGCATTGCTATCAACTGTGAAC | |
| | CCAGAGAGCCCTCCTTAGCCAACACGCTAACTCCGAAGCCTCCCTTACGCCCCCGAACCACCGAAGGCGG | |
| | CGACACCTGATTCAGCGCACAAACACAGGTCCCTTCTGTCCCGGATACAATTACGCGGCAGACACACACT | |
| | CAGACTCGCGCGGGGCAGCCAAGAGACGAGCTATGAAGTCTTACACTCCATATTTCATTCTCCTGTGGAG | |
| | TGCTGTTGGGATAGCGAAGGCTGCCAAAATCATCATCGTGCCGCCAATTATGTTTGAAAGCCATATGTAC | |
| | ATTTTCAAGACGCTAGCCTCAGCCTTGCACGAGAGAGGCCACCATACAGTGTTCCTCCTCTCTGAAGGCA | |
| | GAGACATCGCCCCATCTAATCATTACAGCCTCCAGCGCTACCCAGGGATCTTTAACAGTACCACCTCAGA | |
| | TGCTTTCCTACAGTCCAAGATGCGGAATATTTTCTCTGGGAGATTGACAGCAATCGAACTGTTTGACATA | |
| | CTGGATCACTATACTAAGAACTGTGACCTGATGGTTGGCAACCATGCCCTGATCCAGGGTCTGAAGAAAG | |
| | AAAAATTTGACCTGCTGCTGGTGGACCCTAATGATATGTGTGGATTTGTGATAGCTCATCTTTTAGGGGT | |
| | TAAATATGCTGTATTTTCAACTGGCCTTTGGTATCCTGCTGAAGTGGGTGCTCCTGCTCCATTAGCATAC | |
| | GTCCCAGAGTTTAACTCACTCCTCACAGACCGCATGAACTTGCTGCAAAGGATGAAAAATACCGGTGTTT | |
| | ACCTCATTTCCAGATTAGGGGTCAGCTTTCTGGTTCTTCCCAAATATGAAAGGATAATGCAGAAGTACAA | |
| | CCTGCTGCCGGAGAAGTCCATGTATGATTTGGTTCATGGGTCCAGCCTGTGGATGCTGTGTACTGACGTA | |
| | GCACTGGAATTCCCAAGACCCACTCTGCCTAATGTTGTTTATGTAGGAGGAATCCTAACCAAACCAGCCA | |
| | GCCCACTACCAGAAGATCTCCAAAGATGGGTAAATGGTGCTAATGAACATGGCTTTGTCTTGGTGTCTTT | |
| | TGGAGCTGGTGTCAAGTATCTGTCAGAAGACATTGCTAACAAACTGGCAGGAGCTCTGGGGAGATTGCCT | |
| | CAAAAAGTGATTTGGAGGTTTTCTGGACCCAAACCAAAGAATCTAGGAAACAACACTAAACTCATAGAAT | |
| | GGTTACCACAAAATGACCTGCTTGGGCATTCAAAGATTAAAGCCTTCCTGAGCCATGGTGGTTTGAACAG | |
| | TATTTTTGAAACTATGTATCATGGTGTGCCTGTAGTGGGAATTCCACTCTTTGGAGACCATTATGATACT | |
| | ATGACCAGAGTACAGGCAAAAGGCATGGGGATATTGCTAGAATGGAAGACAGTTACTGAAAAAGAGCTCT | |
| | ATGAAGCACTAGTGAAGGTTATCAATAATCCCAGCTACCGTCAGAGGGCTCAGAAGCTTTCGGAAATTCA | |
| | CAAGGATCAACCTGGTCACCCTGTCAATCGAACTATCTATTGGATAGATTATATTATTCGTCACAATGGA | |
| | GCCCATCACCTACGTGCCGCTGTCCATCAGATCTCCTTTTGTCAGTATTTTTTACTGGATATTGCCTTTG | |
| | TGCTTTTGCTTGGTGCTGCCTTGTTATACTTTCTCTTGTCTTGGGTGACAAAATTTATCTACAGAAAAAT | |
| | CAAAAGTCTGTGGTCTAGAAATAAGCATAGCACAGTTAATGGACATTACCACAATGGAATCCTCAATGGC | |
| | AAGTACAAAAGAAATGGCCATATTAAACATGAAAAGAAAGTGAAATGAGCCAACAGCCCAGGTGATAGAA | |
| | ATAAATTGGTTCACTCATTGAATTTTTATTGCTATTATTTAGTCTAACAGCTACTAAAAGTAAAACATCA | |
| | GTAAACAATTCTAACATGCCCTTATGAGATCTACTAATGAAATTCTGTGGAATTAAGATGGCTGTAAAAA | |
| | GCACAAACCTAAAATGCAGAAATGTATTTTATTCAAATACTGATGTAGAGAGTTTTGGCACTGAACCTTT | |
| | TAGAAGCCTTAATTATTTAAATCAATTCAGTGACTGTGTCAGACCTTAGTTTTAAATCTTGATATGTGCG | |
| | TGTCCCGGATCAGGAATGGTTTCATTTTTCTTAATAATGTGTGTGTGTGTATGTGTGTGTGTGTGTGTGT | |
| | GTGTTTGTGTGTGTGTGTGTGTGTCCTAATTAAGAGAATTTTTACTGGCTGCTTGTTACATTTGTTGAGG | |
| | GTACAACACACTCAAGAATAAAGTAAAAGGATAGTCAGGATCCAGATGTTTCTTTTCTAGCATTTAATGT | |
| | GTGTGAACTCAGAACACTACCATGAAAGAACACTTCCCCCCAAAACTGGATGCAGAGGAAGAAAAAAAAA | |
| | AAAGAAATGGCACAGTTTTTTGTATTTTTTTTTTTAGTTATTTTTTGTTGTTGTTGTTTGTATTGTTTTT | |
| | CTTTTCTGATAGAGTATGGCCACTTCTGGGGGAAAAACATGTAATTAAGTAAATGTATACATTGGTTTTC | |
| | ACGTTTTACTTTTGTTTTCCCACTACCAATAATTTT | |
| LOC400451 | TCTTCCGGGCGCCGCAGCTTCCTGCCAAGCACCGCGCAGCCGCCTCCGCCGCAGGATCCCCCGGTGCAGG | 85 |
| AK075564.1 | CCTCCGTGCTGGTGCGGATCCTGGAGCTCAGCCGCGCGCGCCCTGCCCGATCCTGTGCCGACCCACCGCA | |
| | CTATGCGCGCCGTGCCGCTGCCCGCCCCGCTCCTGCCGCTGCTGCTGCTCGCGCTCCTGGCCGCTCCCAC | |
| | CGCCCGCGCCAGCAGAGCCGAGTCCGTCTCCGCGCCGCGGCCCGAACCCGAGCGCGAGTCGCGGCCACCG | |
| | CCCGGCCCGGGGCCCGGGAACACCACCCGGTTTGGGTCTGGGGCGGCGGGCGGCAGCGGCAGCTCCAACA | |
| | GCAGCGGCGACGCCTTGGTGACCCGCATTTCCATCCTCCTCCGCGACCTACCCACCCTCAAGGCAGCCGT | |
| | GATCGTGGCGTTCGCCTTTACCACCCTCCTCATCGCCTGCCTGCTGCTGCGCGTCTTCAGGTCGGGAAAG | |
| | AGGTTAAAGAAGACACGCAAGTATGATATCATCACCACTCCAGCAGAGCGAGTGGAAATGGCGCCACTAA | |
| | ATGAAGAGGATGATGAAGATGAGGACTCCACAGTATTCGACATCAAATACAGGTAAAACCTGTTTCCCAG | |
| | CCTGGTGGCATCCTGTGGAAAGTTGGTCAGCTGCAACCTGGGGTGTGAAGGACTGGACCTGGAAGCCCTC | |
| | TTGCGTCGGAGGTGTTGAAACCAAAACGAACGTTATGTATAAAACCCCAGCTCCATCGTGCGTGTCAGGC | |
| | ATCTGCTCAGACTGTCACTGGCAAGCTCGTTTCCACGTCACCACAATGGAGTTGCTTCTGCCACCCTTTG | |
| | GGCATCCCTTTAAAGTGCCCCCTACTTCTACTCCCCATGTAAGAGGCTTTGTGCCTTGCTAAGGAGCAAA | |
| | GGGTAGAAACATGTTGATTTTAAAGAAGTTTTTTTAAGACAATTGTTGACAATAGTAAAAGAGATCAGGA | |
| | GGATCAAGAATCTAAAACAAGCCTGAAGGATGTCCAACTGTGTATTTAGAATTTCCGACATTCTTCTCTA | |
| | CTGGATCTACACATTGGACCCCATCTGATCCTTTGCTGCTTTTTTGGCTTGGTCAGGTCCTGGCCTCATT | |
| | TTGGCGTTACCTGTGTCAGAGTTCAAGGTGGATGTGCTTAGAGCTGGTCAGCCCCTTCCAGACCTGGACA | |
| | CGTCTGTGGCTCCTTTTCTTTCTTCCTTTTTTTTTTTAAAAAAAAAAAAGGTTCAGCAGAAATCAGCGTG | |
| | GCTAGTTCACAAAGAATTTCCAGTATCAGGGAAAAACTGTGCGTGTGTGTGTGTGTGTGTGTGCACGTGT | |
| | GTGCGTGTGCACGTGTGTGATACCTATAAAACAGTTTCTCCTTCTCTGAAGGGAAAGGAAAGTGCTAGGC | |
| | AGCCTGTGATTAGCAACATTCTTTGTGCTTTTTTGTTGTTCCTCTGCTCTGTCACAGTTCTACGTTGTTT | |
| | GCCTTAGAAATGTAATTTTTAAAAACCATTTTAAAAATGAACGGTGATTTGGCTGGCTGGAAAAAATCAC | |
| | ACTGTCAGGGGACTATATTTGAAGTCAGTCTAGACGGGGCTGGACTAGGAACCCACCTGGACCCAGGAGA | |
| | CCCCACAGGACCCAGGAGGTCCCTGCCGGAAGGCAGAGGTTCAGGTGAGAGTGGCTCACCTCTGAGCTGG | |
| | TGAAGTGAGGACTTGCCTGTGACATGACCCAGGGATCTGCTGCTGGCTTCTGGAGACAGGGCCTTGGGCT | |
| | GACTTCTCAGGTTGATTGAGGCCTCCTGACTAGCGGTGTTCCCAGGCTAGAGGTGATTGGCTGCAACAAA | |
| | GATGCTTCTATTAGTCTATTAGCAGTGCCTTCGGGACCCTGGGATTTTGCTCTCTCTAGAAAGGTGTTTT | |
| | TTATTTTTTTATTTTTTATCTCCCCCTTTTTTCCTGGCTTTGCTCCAGGGTTTGTGTATTTGCCTGTTTA | |
| | TTGTCCTGCTCTTTTTTTTTTTGGATGAAAACTCCAGCCTTTCCTGACTCACCTCCATCTTCGGTTCTTC | |
| | AGTTTTCTGAGAAGAGTTGGGATATGTGGGAAGGGGCATGGGAGCTCGGCAGCCTCCGCCTGCCAGGAAG | |
| | GCAGTTTCGCCTCTGCAGGAAAGAGCAGAGCCCGTGGGAAGCCCTGGGTGAGGGTGGCGCAGCCGGCCCA | |
| | GCACGCATGGTATTGCCAGCCACGGGGGGCCTGCGTGTAGTCTCTGCTCCCTGCATTTCACCTTCTTTGT | |
| | TGACTTTCCTTCCCTGTTTTCCCCCATCTGTTTGCCAGAGGGGTGGGACTGGCAACAGAACAGCCGTGGC | |
| | TGCTTTATCTCTCCTCTCCACGGTGTACTCAGGCCTGAGTGGTGACTCACGGGAGCCTGGCCACCTCGCA | |
| | GCTGTTCGCCCCCTCAACCTTTGAACTGGAACTGCTGGCTCACACAGGGTTTTCGACAACTGCAGCTGAA | |
| | TCTCATGGAAAAGCTGGATTCCTCTGCCTTACGCAGAAACACCCGGGCTCCATCTGCCAGGTGCTTGCCA | |
| | CTGGTCCTGGCAGAAATGGCGGCTGCTGAAAGTGACCTTCCAAATCCTTGGTGGCACTTCAGCGCCACAG | |
| | GCTCTCCAATAAAAACCCTTTACACAC | |
| KNTC2 | NTTCGAACGGCTTTGGCGGGCCGAGGAAGGACCTGGTGTTTTGATGACCGCTGTCCTGTCTAGCAGATAC | 86 |
| AK313184.1 | TTGCACGGTTTACAGAAATTCGGTCCCTGGGTCGTGTCAGGAAACTGGAAAAAAGGTCATAATCATGAAG | |
| | CGCAGTTCAGTTTCCAGCGGTGGTGCTGGCCGCCTCTCCATGCAGGAGTTAAGATCCCAGGATGTAAATA | |
| | AACAAGGCCTCTATACCCCTCAAACCAAAGAGAAACCAACCTTTGGAAAGTTGAGTATAAACAAACCGAC | |
| | ATCTGAAAGAAAAGTCTCGCTATTTGGCAAAAGAACTAGTGGACATGGATCCCGGAATAGTCAACTTGGT | |
| | ATATTTTCCAGTTCTGAGAAAATCAAGGACCCGAGACCACTTAATGACAAAGCATTCATTCAGCAGTGTA | |
| | TTCGACAACTCTGTGAGTTTCTTACAGAAAATGGTTATGCACATAATGTGTCCATGAAATCTCTACAAGC | |
| | TCCCTCTGTTAAAGACTTCCTGAAGATCTTCACGTTTCTTTATGGCTTCCTGTGCCCCTCATACGAACTT | |
| | CCTGACACAAAGTTTGAAGAAGAGGTTCCAAGAATCTTTAAAGACCTTGGGTATCCTTTTGCACTATCCA | |
| | AAAGCTCCATGTACACAGTGGGGGCTCCTCATACATGGCCTCACATTGTGGCAGCCTTAGTTTGGCTAAT | |
| | AGACTGCATCAAGATACATACTGCCATGAAAGAAAGCTCACCTTTATTTGATGATGGGCAGCCTTGGGGA | |
| | GAAGAAACTGAAGATGGAATTATGCATAATAAGTTGTTTTTGGACTACACCATAAAATGCTATGAGAGTT | |
| | TTATGAGTGGTGCCGACAGCTTTGATGAGATGAATGCAGAGCTGCAGTCAAAACTGAAGGATTTATTTAA | |
| | TGTGGATGCTTTTAAGCTGGAATCATTAGAAGCAAAAAACAGAGCATTGAATGAACAGATTGCAAGATTG | |
| | GAACAAGAAAGAGAAAAAGAACCGAATCGTCTAGAGTCGTTGAGAAAACTGAAGGCTTCCTTACAAGGAG | |
| | ATGTTCAAAAGTATCAGGCATACATGAGCAATTTGGAGTCTCATTCAGCCATTCTTGACCAGAAATTAAA | |
| | TGGTCTCAATGAGGAAATTGCTAGAGTAGAACTAGAATGTGAAACAATAAAACAGGAGAACACTCGACTA | |
| | CAGAATATCATTGACAACCAGAAGTACTCAGTTGCAGACATTGAGCGAATAAATCATGAAAGAAATGAAT | |
| | TGCAGCAGACTATTAATAAATTAACCAAGGACCTGGAAGCTGAACAACAGAAGTTGTGGAATGAGGAGTT | |
| | AAAATATGCCAGAGGCAAAGAAGCGATTGAAACACAATTAGCAGAGTATCACAAATTGGCTAGAAAATTA | |
| | AAACTTATTCCTAAAGGTGCTGAGAATTCCAAAGGTTATGACTTTGAAATTAAGTTTAATCCCGAGGCTG | |
| | GTGCCAACTGCCTTGTCAAATACAGGGCTCAAGTTTATGTACCTCTTAAGGAACTCCTGAATGAAACTGA | |
| | AGAAGAAATTAATAAAGCCCTAAATAAAAAAATGGGTTTGGAGGATACTTTAGAACAATTGAATGCAATG | |
| | ATAACAGAAAGCAAGAGAAGTGTGAGAACTCTGAAAGAAGAAGTTCAAAAGCTGGATGATCTTTACCAAC | |
| | AAAAAATTAAGGAAGCAGAGGAAGAGGATGAAAAATGTGCCAGTGAGCTTGAGTCCTTGGAGAAACACAA | |
| | GCACCTGCTAGAAAGTACTGTTAACCAGGGGCTCAGTGAAGCTATGAATGAATTAGATGCTGTTCAGCGG | |
| | GAATACCAACTAGTTGTGCAAACCACGACTGAAGAAAGACGAAAAGTGGGAAATAACTTGCAACGTCTGT | |
| | TAGAGATGGTTGCTACACATGTTGGGTCTGTAGAGAAACATCTTGAGGAGCAGATTGCTAAAGTTGATAG | |
| | AGAATATGAAGAATGCATGTCAGAAGATCTCTCGGAAAATATTAAAGAGATTAGAGATAAGTATGAGAAG | |
| | AAAGCTACTCTAATTAAGTCTTCTGAAGAATGA | |
| TMC5 | GAGGGCCAGCGCAAGCAGCGGCAACAGGAGCGCCAGGAGGTGAGGCGGGTTCGCCAGGAGTGGGGCCAGC | 87 |
| NM_001105248.1 | GCCCGGGCTGCCAGCCTAGCAGGGGCGTCTTGGCGGAGCCCCCTCGCCGGCTCCCAGAGAGGCTGGGAAG | |
| | AACTGGGAGGGGTGTCCCCAATGCGGGGCGCCCAAGCGTGGCAGCACGGGCTGGGAGCGGGGAGCCAGCG | |
| | GGGTGCGGCGCCGGAGTGCGGGGAGAACCACCAGGCGCCGGAATTGGGGAGCACGTGGAGGGGGCAGCGG | |
| | CTCCAGCCCCAGACCGCCGCGCTCTGTCACTTTGCATTAAGAAAGCTTCCGGGGAATGCACACGGCCTGG | |
| | CCGCCGCCTTCGTGCAGCCCGCCCTGCAGGTGCAGGAAGAAAAGAATAATCGCACCCGTTTCTCAGGTGC | |
| | TTACTTCACCATGTCCGATCCGGACATGAGGCTCTGCCTGCAGTCAGCAACTTGGAATATTCAGACTTCA | |
| | GACCAGCATCACAGATTATAACCCTCCGTAAATCATCTGCATCCCAGCTCCCATCAAAAGCCAGCCTGAA | |
| | GGACCCATGGACACGTGACTCCAGTGTTCTCAACAACATCTTAAGATCAAGTTGGTTTGCACAACATTTG | |
| | CATCTACTTGGGACAAAGCAAGAACAATAAGGGCAAAAAAGTGAAAAAAAAAAAAGATCCCTGAGTAATT | |
| | GCAAATGCTGGGACAGTTTACCACTCCAGGGTGAAGAGTCCATACCAACATGTCTGCCTACTACAGGAAT | |
| | AACTGGTCTGAGGAAGACCCAGATTACCCTGACTATTCAGGGTCTCAGAACCGTACGCAGGGGTATTTGA | |
| | AAACTCAAGGTTATCCAGATGTTCCAGGTCCTCTGAACAATCCAGACTACCCCGGCACCAGGAGCAATCC | |
| | ATACTCTGTAGCCTCCAGAACACGTCCAGACTATCCTGGGTCTCTGGCAGAACCAAATTATCCTAGATCT | |
| | CTGAGTAATCCAGACTATTCTGGCACCAGAAGCAATGCATACTCTGCAGCCTCTAGAACAAGCCCAGACC | |
| | ATCCTACCTCTCTACCAGAGCCAGATTATAGTGAATTTCAGAGTCATCCCTACCACCGAGCATCATCCAG | |
| | ACAACCAGACTACCCTGGATCTCAACGAAATCCTGATTTTGCAGGCTCCAGCAGCAGTGGAAACTATGCA | |
| | GGCTCCAGAACACATCCAGATCATTTTGGCTCCTTAGAACCGGACTACCCTGGAGCTCAGAGCAACTCTG | |
| | ATCATCCTGGACCCAGAGCCAATTTGAACCATCCAGGATCCAGAAAGAATCTGGAACATACAAGTTTTAG | |
| | AATCAATCCATACGCAGACTCTCTGGGAAAGCCTGATTATCCAGGCGCTGACATTCAACCTAACTCTCCA | |
| | CCCTTTTTTGGGGAGCCAGACTATCCCAGTGCTGAGGACAATCAGAACTTGCCAAGCACTTGGAGAGAAC | |
| | CTGATTATTCAGATGCTGAGAATGGTCATGATTATGGCTCTTCTGAGACCCCAAAGATGACCAGGGGGGT | |
| | GCTCAGCAGAACATCTTCAATCCAGCCCTCATTTCGTCACAGGAGTGATGACCCCGTGGGCAGTCTTTGG | |
| | GGAGAGAATGATTACCCTGAAGGCATTGAAATGGCATCCATGGAGATGGCAAACTCATATGGCCACTCTC | |
| | TGCCAGGTGCTCCTGGAAGTGGCTATGTGAACCCTGCTTATGTAGGTGAAAGTGGTCCTGTCCATGCTTA | |
| | TGGAAACCCACCATTGTCTGAATGTGATTGGCACAAGTCACCCCAAGGACAGAAGTTAATCGCATCCCTT | |
| | ATACCCATGACATCCAGAGACAGAATTAAAGCCATCAGGAACCAGCCAAGGACCATGGAAGAGAAAAGGA | |
| | ACCTTAGGAAAATAGTTGACAAAGAAAAAAGCAAACAGACCCATCGTATCCTTCAGCTCAATTGCTGTAT | |
| | TCAGTGTCTGAACTCCATTTCCCGGGCTTATCGGAGATCCAAGAACAGCCTGTCGGAAATTCTGAATTCC | |
| | ATCAGCCTGTGGCAGAAGACGCTGAAGATCATTGGAGGCAAGTTTGGAACCAGCGTCCTCTCCTATTTCA | |
| | ACTTTCTGAGATGGCTTTTGAAGTTCAACATTTTCTCATTCATCCTGAACTTCAGCTTCATCATAATCCC | |
| | TCAGTTTACCGTGGCCAAAAAGAACACCCTCCAGTTCACTGGGCTGGAGTTTTTCACTGGGGTGGGTTAT | |
| | TTTAGGGACACAGTGATGTACTATGGCTTTTACACCAATTCCACCATCCAGCACGGGAACAGCGGGGCAT | |
| | CCTACAACATGCAGCTGGCCTACATCTTCACAATCGGAGCATGCTTGACCACCTGCTTCTTCAGTTTGCT | |
| | GTTCAGCATGGCCAAGTATTTCCGGAACAACTTCATTAATCCCCACATTTACTCCGGAGGGATCACCAAG | |
| | CTGATCTTTTGCTGGGACTTCACTGTCACTCATGAAAAAGCTGTGAAGCTAAAACAGAAGAATCTTAGCA | |
| | CTGAGATAAGGGAGAACCTGTCAGAGCTCCGTCAGGAGAATTCCAAGTTGACGTTCAATCAGCTGCTGAC | |
| | CCGCTTCTCTGCCTACATGGTAGCCTGGGTTGTCTCTACAGGAGTGGCCATAGCCTGCTGTGCAGCCGTT | |
| | TATTACCTGGCTGAGTACAACTTAGAGTTCCTGAAGACACACAGTAACCCTGGGGCGGTGCTGTTACTGC | |
| | CTTTCGTTGTGTCCTGCATTAATCTGGCCGTGCCATGCATCTACTCCATGTTCAGGCTTGTGGAGAGGTA | |
| | CGAGATGCCACGGCACGAAGTCTACGTTCTCCTGATCCGAAACATCTTTTTGAAAATATCAATCATTGGC | |
| | ATTCTTTGTTACTATTGGCTCAACACCGTGGCCCTGTCTGGTGAAGAGTGTTGGGAAACCCTCATTGGCC | |
| | AGGACATCTACCGGCTCCTTCTGATGGATTTTGTGTTCTCTTTAGTCAATTCCTTCCTGGGGGAGTTTCT | |
| | GAGGAGAATCATTGGGATGCAACTGATCACAAGTCTTGGCCTTCAGGAGTTTGACATTGCCAGGAACGTT | |
| | CTAGAACTGATCTATGCACAAACTCTGGTGTGGATTGGCATCTTCTTCTGCCCCCTGCTGCCCTTTATCC | |
| | AAATGATTATGCTTTTCATCATGTTCTACTCCAAAAATATCAGCCTGATGATGAATTTCCAGCCTCCGAG | |
| | CAAAGCCTGGCGGGCCTCACAGATGATGACTTTCTTCATCTTCTTGCTCTTTTTCCCATCCTTCACCGGG | |
| | GTCTTGTGCACCCTGGCCATCACCATCTGGAGATTGAAGCCTTCAGCTGACTGTGGCCCTTTTCGAGGTC | |
| | TGCCTCTCTTCATTCACTCCATCTACAGCTGGATCGACACCCTAAGTACACGGCCTGGCTACCTGTGGGT | |
| | TGTTTGGATCTATCGGAACCTCATTGGAAGTGTGCACTTCTTTTTCATCCTCACCCTCATTGTGCTAATC | |
| | ATCACCTATCTTTACTGGCAGATCACAGAGGGAAGGAAGATTATGATAAGGCTGCTCCATGAGCAGATCA | |
| | TTAATGAGGGCAAAGATAAAATGTTCCTGATAGAAAAATTGATCAAGCTGCAGGATATGGAGAAGAAAGC | |
| | AAACCCCAGCTCACTTGTTCTGGAAAGGAGAGAGGTGGAGCAACAAGGCTTTTTGCATTTGGGGGAACAT | |
| | GATGGCAGTCTTGACTTGCGATCTAGAAGATCAGTTCAAGAAGGTAATCCAAGGGCCTGATGACTCTTTT | |
| | GGTAACCAGACACCAATCAAATAAGGGGAGGAGACGAAAATGGAATGATTTCTTCCATGCCACCTGTGCC | |
| | TTTAGGAACTGCCCAGAAGAAAATCCAAGGCTTTAGCCAGGAGCGGAAACTGACTACCATGTAATTATCA | |
| | AAGTAAAATTGGGCATTCCATGCTATTTTTAATACCTGGATTGCTGATTTTTCAAGACAAAATACTTGGG | |
| | GTTTTCCAATAAAGATTGTTGTAATATTGAAATGAGCCTACAAAAACCTAGGAAGAGATAACTAGGGAAT | |
| | AATGTATATTATCTTCAAGAAGTGTGTGCAGGAATGATTGGTTCTTAGAAATCTCTCCTGCCAGACTTCC | |
| | CAGACCTGGCAAAGGTTTAGAAACTGTTGCTAAGAAAAGTGGTCCATCCTGAATAAACATGTAATACTCC | |
| | AGCAGGGATATGAAGCCTCTGAATTGTAGAACCTGCATTTATTTGTGACTTTGAACTAAAGACATCCCCC | |
| | ATGTCCCAAAGGTGGAATACAACCAGAGGTCTCATCTCTGAACTTTCTTGCGTACTGATTACATGAGTCT | |
| | TTGGAGTCGGGGATGGAGGAGGTTCTGCCCCTGTGAGGTGTTATACATGACCATCAAAGTCCTACGTCAA | |
| | GCTAGCTTTGCAGTGGCAGTACCGTAGCCAATGAGATTTATCCGAGACGCGATTATTGCTAATTGGAAAT | |
| | TTTCCCAATACCCCACCGTGATGACTTGAAATATAATCAGCGCTGGCAATTTTTGACAGTCTCTACGGAG | |
| | ACTGAATAAGAAAAAAGAAAAGAAAAGAAATTAGCTGGGTGCGATGGCTTATGCCTGTAATCCCGGCACT | |
| | TTGGGAGGCTGAGGCAAGCGGATCACTTAATGTCAGGAGTTCAAGACCAGCCTGGCCAACATGGTGAAAC | |
| | CCCGTCTCTACTAAAAATAAAAAAACTAGCTGGGCGTGGTGGTACATGCCTATAATCCCAGCTACTCGGG | |
| | AGGCTGAGGCAGGAGAATTGCTTGAACCTGGGAGGCAGAGGTTGCAGTGAGGCGAGATTGTACCACTGCA | |
| | TTCCAGCCTGGGCAACAGTGAGACTCTGCCTCAAAAAAATAAATAAATAAATAAATAAAGTAAATTAAAA | |
| | GTCTTATTCAAACCAAA | |
| ERBB2 | GTTCCCGGATTTTTGTGGGCGCCTGCCCCGCCCCTCGTCCCCCTGCTGTGTCCATATATCGAGGCGATAG | 88 |
| NM_001005862.1 | GGTTAAGGGAAGGCGGACGCCTGATGGGTTAATGAGCAAACTGAAGTGTTTTCCATGATCTTTTTTGAGT | |
| | CGCAATTGAAGTACCACCTCCCGAGGGTGATTGCTTCCCCATGCGGGGTAGAACCTTTGCTGTCCTGTTC | |
| | ACCACTCTACCTCCAGCACAGAATTTGGCTTATGCCTACTCAATGTGAAGATGATGAGGATGAAAACCTT | |
| | TGTGATGATCCACTTCCACTTAATGAATGGTGGCAAAGCAAAGCTATATTCAAGACCACATGCAAAGCTA | |
| | CTCCCTGAGCAAAGAGTCACAGATAAAACGGGGGCACCAGTAGAATGGCCAGGACAAACGCAGTGCAGCA | |
| | CAGAGACTCAGACCCTGGCAGCCATGCCTGCGCAGGCAGTGATGAGAGTGACATGTACTGTTGTGGACAT | |
| | GCACAAAAGTGAGTGTGCACCGGCACAGACATGAAGCTGCGGCTCCCTGCCAGTCCCGAGACCCACCTGG | |
| | ACATGCTCCGCCACCTCTACCAGGGCTGCCAGGTGGTGCAGGGAAACCTGGAACTCACCTACCTGCCCAC | |
| | CAATGCCAGCCTGTCCTTCCTGCAGGATATCCAGGAGGTGCAGGGCTACGTGCTCATCGCTCACAACCAA | |
| | GTGAGGCAGGTCCCACTGCAGAGGCTGCGGATTGTGCGAGGCACCCAGCTCTTTGAGGACAACTATGCCC | |
| | TGGCCGTGCTAGACAATGGAGACCCGCTGAACAATACCACCCCTGTCACAGGGGCCTCCCCAGGAGGCCT | |
| | GCGGGAGCTGCAGCTTCGAAGCCTCACAGAGATCTTGAAAGGAGGGGTCTTGATCCAGCGGAACCCCCAG | |
| | CTCTGCTACCAGGACACGATTTTGTGGAAGGACATCTTCCACAAGAACAACCAGCTGGCTCTCACACTGA | |
| | TAGACACCAACCGCTCTCGGGCCTGCCACCCCTGTTCTCCGATGTGTAAGGGCTCCCGCTGCTGGGGAGA | |
| | GAGTTCTGAGGATTGTCAGAGCCTGACGCGCACTGTCTGTGCCGGTGGCTGTGCCCGCTGCAAGGGGCCA | |
| | CTGCCCACTGACTGCTGCCATGAGCAGTGTGCTGCCGGCTGCACGGGCCCCAAGCACTCTGACTGCCTGG | |
| | CCTGCCTCCACTTCAACCACAGTGGCATCTGTGAGCTGCACTGCCCAGCCCTGGTCACCTACAACACAGA | |
| | CACGTTTGAGTCCATGCCCAATCCCGAGGGCCGGTATACATTCGGCGCCAGCTGTGTGACTGCCTGTCCC | |
| | TACAACTACCTTTCTACGGACGTGGGATCCTGCACCCTCGTCTGCCCCCTGCACAACCAAGAGGTGACAG | |
| | CAGAGGATGGAACACAGCGGTGTGAGAAGTGCAGCAAGCCCTGTGCCCGAGTGTGCTATGGTCTGGGCAT | |
| | GGAGCACTTGCGAGAGGTGAGGGCAGTTACCAGTGCCAATATCCAGGAGTTTGCTGGCTGCAAGAAGATC | |
| | TTTGGGAGCCTGGCATTTCTGCCGGAGAGCTTTGATGGGGACCCAGCCTCCAACACTGCCCCGCTCCAGC | |
| | CAGAGCAGCTCCAAGTGTTTGAGACTCTGGAAGAGATCACAGGTTACCTATACATCTCAGCATGGCCGGA | |
| | CAGCCTGCCTGACCTCAGCGTCTTCCAGAACCTGCAAGTAATCCGGGGACGAATTCTGCACAATGGCGCC | |
| | TACTCGCTGACCCTGCAAGGGCTGGGCATCAGCTGGCTGGGGCTGCGCTCACTGAGGGAACTGGGCAGTG | |
| | GACTGGCCCTCATCCACCATAACACCCACCTCTGCTTCGTGCACACGGTGCCCTGGGACCAGCTCTTTCG | |
| | GAACCCGCACCAAGCTCTGCTCCACACTGCCAACCGGCCAGAGGACGAGTGTGTGGGCGAGGGCCTGGCC | |
| | TGCCACCAGCTGTGCGCCCGAGGGCACTGCTGGGGTCCAGGGCCCACCCAGTGTGTCAACTGCAGCCAGT | |
| | TCCTTCGGGGCCAGGAGTGCGTGGAGGAATGCCGAGTACTGCAGGGGCTCCCCAGGGAGTATGTGAATGC | |
| | CAGGCACTGTTTGCCGTGCCACCCTGAGTGTCAGCCCCAGAATGGCTCAGTGACCTGTTTTGGACCGGAG | |
| | GCTGACCAGTGTGTGGCCTGTGCCCACTATAAGGACCCTCCCTTCTGCGTGGCCCGCTGCCCCAGCGGTG | |
| | TGAAACCTGACCTCTCCTACATGCCCATCTGGAAGTTTCCAGATGAGGAGGGCGCATGCCAGCCTTGCCC | |
| | CATCAACTGCACCCACTCCTGTGTGGACCTGGATGACAAGGGCTGCCCCGCCGAGCAGAGAGCCAGCCCT | |
| | CTGACGTCCATCATCTCTGCGGTGGTTGGCATTCTGCTGGTCGTGGTCTTGGGGGTGGTCTTTGGGATCC | |
| | TCATCAAGCGACGGCAGCAGAAGATCCGGAAGTACACGATGCGGAGACTGCTGCAGGAAACGGAGCTGGT | |
| | GGAGCCGCTGACACCTAGCGGAGCGATGCCCAACCAGGCGCAGATGCGGATCCTGAAAGAGACGGAGCTG | |
| | AGGAAGGTGAAGGTGCTTGGATCTGGCGCTTTTGGCACAGTCTACAAGGGCATCTGGATCCCTGATGGGG | |
| | AGAATGTGAAAATTCCAGTGGCCATCAAAGTGTTGAGGGAAAACACATCCCCCAAAGCCAACAAAGAAAT | |
| | CTTAGACGAAGCATACGTGATGGCTGGTGTGGGCTCCCCATATGTCTCCCGCCTTCTGGGCATCTGCCTG | |
| | ACATCCACGGTGCAGCTGGTGACACAGCTTATGCCCTATGGCTGCCTCTTAGACCATGTCCGGGAAAACC | |
| | GCGGACGCCTGGGCTCCCAGGACCTGCTGAACTGGTGTATGCAGATTGCCAAGGGGATGAGCTACCTGGA | |
| | GGATGTGCGGCTCGTACACAGGGACTTGGCCGCTCGGAACGTGCTGGTCAAGAGTCCCAACCATGTCAAA | |
| | ATTACAGACTTCGGGCTGGCTCGGCTGCTGGACATTGACGAGACAGAGTACCATGCAGATGGGGGCAAGG | |
| | TGCCCATCAAGTGGATGGCGCTGGAGTCCATTCTCCGCCGGCGGTTCACCCACCAGAGTGATGTGTGGAG | |
| | TTATGGTGTGACTGTGTGGGAGCTGATGACTTTTGGGGCCAAACCTTACGATGGGATCCCAGCCCGGGAG | |
| | ATCCCTGACCTGCTGGAAAAGGGGGAGCGGCTGCCCCAGCCCCCCATCTGCACCATTGATGTCTACATGA | |
| | TCATGGTCAAATGTTGGATGATTGACTCTGAATGTCGGCCAAGATTCCGGGAGTTGGTGTCTGAATTCTC | |
| | CCGCATGGCCAGGGACCCCCAGCGCTTTGTGGTCATCCAGAATGAGGACTTGGGCCCAGCCAGTCCCTTG | |
| | GACAGCACCTTCTACCGCTCACTGCTGGAGGACGATGACATGGGGGACCTGGTGGATGCTGAGGAGTATC | |
| | TGGTACCCCAGCAGGGCTTCTTCTGTCCAGACCCTGCCCCGGGCGCTGGGGGCATGGTCCACCACAGGCA | |
| | CCGCAGCTCATCTACCAGGAGTGGCGGTGGGGACCTGACACTAGGGCTGGAGCCCTCTGAAGAGGAGGCC | |
| | CCCAGGTCTCCACTGGCACCCTCCGAAGGGGCTGGCTCCGATGTATTTGATGGTGACCTGGGAATGGGGG | |
| | CAGCCAAGGGGCTGCAAAGCCTCCCCACACATGACCCCAGCCCTCTACAGCGGTACAGTGAGGACCCCAC | |
| | AGTACCCCTGCCCTCTGAGACTGATGGCTACGTTGCCCCCCTGACCTGCAGCCCCCAGCCTGAATATGTG | |
| | AACCAGCCAGATGTTCGGCCCCAGCCCCCTTCGCCCCGAGAGGGCCCTCTGCCTGCTGCCCGACCTGCTG | |
| | GTGCCACTCTGGAAAGGCCCAAGACTCTCTCCCCAGGGAAGAATGGGGTCGTCAAAGACGTTTTTGCCTT | |
| | TGGGGGTGCCGTGGAGAACCCCGAGTACTTGACACCCCAGGGAGGAGCTGCCCCTCAGCCCCACCCTCCT | |
| | CCTGCCTTCAGCCCAGCCTTCGACAACCTCTATTACTGGGACCAGGACCCACCAGAGCGGGGGGCTCCAC | |
| | CCAGCACCTTCAAAGGGACACCTACGGCAGAGAACCCAGAGTACCTGGGTCTGGACGTGCCAGTGTGAAC | |
| | CAGAAGGCCAAGTCCGCAGAAGCCCTGATGTGTCCTCAGGGAGCAGGGAAGGCCTGACTTCTGCTGGCAT | |
| | CAAGAGGTGGGAGGGCCCTCCGACCACTTCCAGGGGAACCTGCCATGCCAGGAACCTGTCCTAAGGAACC | |
| | TTCCTTCCTGCTTGAGTTCCCAGATGGCTGGAAGGGGTCCAGCCTCGTTGGAAGAGGAACAGCACTGGGG | |
| | AGTCTTTGTGGATTCTGAGGCCCTGCCCAATGAGACTCTAGGGTCCAGTGGATGCCACAGCCCAGCTTGG | |
| | CCCTTTCCTTCCAGATCCTGGGTACTGAAAGCCTTAGGGAAGCTGGCCTGAGAGGGGAAGCGGCCCTAAG | |
| | GGAGTGTCTAAGAACAAAAGCGACCCATTCAGAGACTGTCCCTGAAACCTAGTACTGCCCCCCATGAGGA | |
| | AGGAACAGCAATGGTGTCAGTATCCAGGCTTTGTACAGAGTGCTTTTCTGTTTAGTTTTTACTTTTTTTG | |
| | TTTTGTTTTTTTAAAGATGAAATAAAGACCCAGGGGGAGAATGGGTGTTGTATGGGGAGGCAAGTGTGGG | |
| | GGGTCCTTCTCCACACCCACTTTGTCCATTTGCAAATATATTTTGGAAAACAGCTA | |
| CA12 | ATAAAAGCTGCCCGGGGAAGCCAGGAGAGCGAAGGGCGGACGTACTCGCCACGGCACCCAGGCTGCGCGC | 89 |
| NM_001218.3 | ACGCGGTCCCGGTGTGCAGCTGGAGAGCGAGCGGCCACCGGGAGCCCCCGGCACAGCCCGCGCCCGCCCC | |
| | GCAGGAGCCCGCGAAGATGCCCCGGCGCAGCCTGCACGCGGCGGCCGTGCTCCTGCTGGTGATCTTAAAG | |
| | GAACAGCCTTCCAGCCCGGCCCCAGTGAACGGTTCCAAGTGGACTTATTTTGGTCCTGATGGGGAGAATA | |
| | GCTGGTCCAAGAAGTACCCGTCGTGTGGGGGCCTGCTGCAGTCCCCCATAGACCTGCACAGTGACATCCT | |
| | CCAGTATGACGCCAGCCTCACGCCCCTCGAGTTCCAAGGCTACAATCTGTCTGCCAACAAGCAGTTTCTC | |
| | CTGACCAACAATGGCCATTCAGTGAAGCTGAACCTGCCCTCGGACATGCACATCCAGGGCCTCCAGTCTC | |
| | GCTACAGTGCCACGCAGCTGCACCTGCACTGGGGGAACCCGAATGACCCGCACGGCTCTGAGCACACCGT | |
| | CAGCGGACAGCACTTCGCCGCCGAGCTGCACATTGTCCATTATAACTCAGACCTTTATCCTGACGCCAGC | |
| | ACTGCCAGCAACAAGTCAGAAGGCCTCGCTGTCCTGGCTGTTCTCATTGAGATGGGCTCCTTCAATCCGT | |
| | CCTATGACAAGATCTTCAGTCACCTTCAACATGTAAAGTACAAAGGCCAGGAAGCATTCGTCCCGGGATT | |
| | CAACATTGAAGAGCTGCTTCCGGAGAGGACCGCTGAATATTACCGCTACCGGGGGTCCCTGACCACACCC | |
| | CCTTGCAACCCCACTGTGCTCTGGACAGTTTTCCGAAACCCCGTGCAAATTTCCCAGGAGCAGCTGCTGG | |
| | CTTTGGAGACAGCCCTGTACTGCACACACATGGACGACCCTTCCCCCAGAGAAATGATCAACAACTTCCG | |
| | GCAGGTCCAGAAGTTCGATGAGAGGCTGGTATACACCTCCTTCTCCCAAGTGCAAGTCTGTACTGCGGCA | |
| | GGACTGAGTCTGGGCATCATCCTCTCACTGGCCCTGGCTGGCATTCTTGGCATCTGTATTGTGGTGGTGG | |
| | TGTCCATTTGGCTTTTCAGAAGGAAGAGTATCAAAAAAGGTGATAACAAGGGAGTCATTTACAAGCCAGC | |
| | CACCAAGATGGAGACTGAGGCCCACGCTTGAGGTCCCCGGAGCTCCCGGGCACATCCAGGAAGGACCTTG | |
| | CTTTGGACCCTACACACTTCGGCTCTCTGGACACTTGCGACACCTCAAGGTGTTCTCTGTAGCTCAATCT | |
| | GCAAACATGCCAGGCCTCAGGGATCCTCTGCTGGGTGCCTCCTTGCCTTGGGACCATGGCCACCCCAGAG | |
| | CCATCCGATCGATGGATGGGATGCACTCTCAGACCAAGCAGCAGGAATTCAAAGCTGCTTGCTGTAACTG | |
| | TGTGAGATTGTGAAGTGGTCTGAATTCTGGAATCACAAACCAAGCCATGCTGGTGGGCCATTAATGGTTG | |
| | GAAAACACTTTCATCCGGGGCTTTGCCAGAGCGTGCTTTCAAGTGTCCTGGAAATTCTGCTGCTTCTCCA | |
| | AGCTTTCAGACAAGAATGTGCACTCTCTGCTTAGGTTTTGCTTGGGAAACTCAACTTCTTTCCTCTGGAG | |
| | ACGGGGCATCTCCCTCTGATTTCCTTCTGCTATGACAAAACCTTTAATCTGCACCTTACAACTCGGGGAC | |
| | AAATGGGGACAGGAAGGATCAAGTTGTAGAGAGAAAAAGAAAACAAGAGATATACATTGTGATATATTAG | |
| | GGACACTTTCACAGTCCTGTCCTCTGGATCACAGACACTGCACAGACCTTAGGGAATGGCAGGTTCAAGT | |
| | TCCACTTCTTGGTGGGGATGAGAAGGGAGAGAGAGCTAGAGGGACAAAGAGAATGAGAAGACATGGATGA | |
| | TCTGGGAGAGTCTCACTTTGGAATCAGAATTGGAATCACATTCTGTTTATCAAGCCATAATGTAAGGACA | |
| | GAATAATACAATATTAAGTCCAAATCCAACCTCCTGTCAGTGGAGCAGTTATGTTTTATACTCTACAGAT | |
| | TTTACAAATAATGAGGCTGTTCCTTGAAAATGTGTTGTTGCTGTGTCCTGGAGGAGACATGAGTTCCGAG | |
| | ATGACCCAATCTGCCTTTGAATCTGGAGGAAATAGGCAGAAACAAAATGACTGTAGAACTTATTCTCTGT | |
| | AGGCCAAATTTCATTTCAGCCACTTCTGCAGGATCCCTACTGCCAACCTGGAATGGAGACTTTTATCTAC | |
| | TTCTCTCTCTCTGAAGATGTCAAATCGTGGTTTAGATCAAATATATTTCAAGCTATAAAAGCAGGAGGTT | |
| | ATCTGTGCAGGGGGCTGGCATCATGTATTTAGGGGCAAGTAATAATGGAATGCTACTAAGATACTCCATA | |
| | TTCTTCCCCGAATCACACAGACAGTTTCTGACAGGCGCAACTCCTCCATTTTCCTCCCGCAGGTGAGAAC | |
| | CCTGTGGAGATGAGTCAGTGCCATGACTGAGAAGGAACCGACCCCTAGTTGAGAGCACCTTGCAGTTCCC | |
| | CGAGAACTTTCTGATTCACAGTCTCATTTTGACAGCATGAAATGTCCTCTTGAAGCATAGCTTTTTAAAT | |
| | ATCTTTTTCCTTCTACTCCTCCCTCTGACTCTAAGAATTCTCTCTTCTGGAATCGCTTGAACCCAGGAGG | |
| | CGGAGGTTGCAGTAAGCCAAGGTCATGCCACTGCACTCTAGCCTGGGTGACAGAGCGAGACTCCATCTCA | |
| | AAAAAAAAAAAAAAAAAATTATTCTGTACCATCACAACTTTTCACAACGATGGCAAGCCTTATGTCTTGG | |
| | GAGCCTGTTTTGCTAGGCAAAGTTACAAGTGACCTAATGGGAGCTCAAATGTGTGTGTGTCTCTCTGTGT | |
| | GTTTGTGTGTGTGTGTGCACTCAAGACCTCTAACAGCCTCGAAGCCTGGGGTGGCATCCCGGCCTTGCCA | |
| | TTAGCATGCCTCATGCATCATCAGATGACAAGGACAACCCTCATGACGAAGCAACATGAATTAGGGGGCC | |
| | TCTTGGCCTTGGTCCAAAATTGTCAATCAGAAATGAACATAAAGGACTCCAGAGCAGTGGGACTGTCTGT | |
| | CAAAAGACTCTGTATATCTTTTGTGGATGAGTTTTGTGAGAGAACAGAGAGACCATTGTACCTGGCACAA | |
| | GGGCTGTTCATGAAAAGGGAGACTTACTGGGAGGTGCAAGACAGTGGCATTTCTCCTCTCCTCTTGCTGC | |
| | TCAGCACAGCCCTGGATTGCAGCCCCGAGGCTGAGACCAGACAAAGCCCGGGAGGCAGAAAGATGCTCCA | |
| | AGAACCAACACTATCAATGTCTTTGCAAATCCTCACAGGATTCCTGTGGGTCCAGCTTTGGAACTGGGAA | |
| | ACCTTTCTTCGGATCCGCACTCATTCCACTGATGCCAGCTGCCCCTGAAGGATGCCAGTACTGTGGTGTG | |
| | TGAGTCTCAGCAGCCGCCCACACGCTCCTAACTCTGCTGCATGGCAGATGCCTAGGTGGAAATAGCAAAA | |
| | ACAAGGCCCAGGCTGGGGCCAGGGCCAGAGGGGAAGGCCCTGGATTCTCACTCATGTGAGATCTTGAATC | |
| | TCTTTCTTTGTTCTGTTTGTTTAGTTAGTATCATCTGGTAAAATAGTTAAAAAACAACAAAAAACTCTGT | |
| | ATCTGTTTCTAGCATGTGCTGCATTGACTCTATTAATCACATTTCAAATTCACCCTACATTCCTCTCCTC | |
| | TTCACTAGCCTCTCTGAAGGTGTCCTGGCCAGCCCTGGAGAAGCACTGGTGTCTGCAGCACCCCTCAGTT | |
| | CCTGTGCCTCAGCCCACAGGCCACTGTGATAATGGTCTGTTTAGCACTTCTGTATTTATTGTAAGAATGA | |
| | TTATAATGAAGATACACACTGTAACTACAAGAAATTATAAATGTTTTTCACATCAAAAAAAAAAAAAAAA | |
| | AA | |
| DKEZp762E1312 | CTATTTGAGTTTGTGGCGCGCGAGGCCCTGCAGTCCGGGTTGGCGCTTGGGTACTGGCTGGGTCCGATGC | 90 |
| NM_018410 | TGGGTACGCTGCGCGCCATGGAGGGCGAGGACGTGGAAGACGACCAGCTGCTGCAGAAGCTCAGGGCCAG | |
| | TCGCCGCCGCTTCCAGAGGCGCATGCAGCGGCTGATAGAGAAGTACAACCAGCCCTTCGAGGACACCCCG | |
| | GTGGTGCAAATGGCCACGCTGACCTACGAGACGCCACAGGGATTGAGAATTTGGGGTGGAAGACTAATAA | |
| | AGGAAAGAAACGAAGGAGAGATCCAGGACTCCTCCATGAAGCCCGCGGACAGGACAGATGGCTCCGTGCA | |
| | AGCTGCAGCCTGGGGTCCTGAGCTTCCCTCGCACCGCACAGTCCTGGGAGCCGATTCAAAAAGCGGTGAG | |
| | GTCGATGCCACGTCAGACCAGGAAGAGTCAGTTGCTTGGGCCTTAGCACCTGCAGTGCCTCAAAGCCCTT | |
| | TGAAAAATGAATTAAGAAGGAAATACTTGACCCAAGTGGATATACTGCTACAAGGTGCAGAGTATTTTGA | |
| | GTGTGCAGGTAACAGAGCTGGAAGGGATGTACGTGTGACTCCGCTGCCTTCACTGGCCTCACCTGCCGTG | |
| | CCTGCCCCCGGATACTGCAGTCGTATCTCCAGAAAGAGTCCTGGTGACCCAGCGAAACCAGCTTCATCTC | |
| | CCAGAGAATGGGATCCTTTGCATCCTTCCTCCACAGACATGGCCTTAGTACCTAGAAATGACAGCCTCTC | |
| | CCTACAAGAGACCAGTAGCAGCAGCTTCTTAAGCAGCCAGCCCTTTGAAGATGATGACATTTGCAATGTG | |
| | ACCATCAGTGACCTGTACGCAGGGATGCTGCACTCCATGAGCCGGCTGTTGAGCACAAAGCCATCAAGCA | |
| | TCATCTCCACCAAAACGTTCATCATGCAAAACTGGAACTCCAGGAGGAGGCACAGATATAAGAGCAGGAT | |
| | GAACAAAACATATTGCAAAGGAGCCAGACGTTCTCAGAGGAGCTCCAAGGAGAACTTCATACCCTGCTCT | |
| | GAGCCTGTGAAAGGGACAGGGGCATTAAGAGATTGCAAGAACGTATTAGATGTTTCTTGCCGTAAGACAG | |
| | GTTTAAAATTGGAAAAAGCTTTTCTTGAAGTCAACAGACCCCAAATCCATAAGTTAGATCCAAGTTGGAA | |
| | GGAGCGCAAAGTGACACCCTCGAAGTATTCTTCCTTGATTTACTTCGACTCCAGTGCAACATATAATCTT | |
| | GATGAGGAAAATAGATTTAGGACATTAAAATGGTTAATTTCTCCTGTAAAAATAGTTTCCAGACCAACAA | |
| | TACGACAGGGCCATGGAGAGAACCGTCAGAGGGAGATTGAAATCCGATTTGATCAGCTTCATCGGGAATA | |
| | TTGCCTGAGTCCCAGGAACCAGCCTCGCCGGATGTGCCTCCCGGACTCCTGGGCCATGAACATGTACAGA | |
| | GGGGGTCCTGCGAGTCCTGGTGGCCTTCAGGGCTTAGAAACCCGCAGGCTGAGTTTACCTTCCAGCAAAG | |
| | CAAAAGCAAAAAGTTTAAGTGAGGCTTTTGAAAACCTAGGCAAAAGATCTCTGGAAGCAGGTAGGTGCCT | |
| | GCCCAAGAGCGATTCATCTTCATCACTTCCAAAGACCAACCCCACACACAGCGCAACTCGCCCGCAGCAG | |
| | ACATCTGACCTTCACGTTCAGGGAAATAGTTCTGGAATATTTAGAAAGTCAGTGTCACCCAGCAAAACTC | |
| | TTTCAGTCCCAGATAAAGAAGTGCCAGGCCACGGAAGGAATCGTTACGATGAAATTAAAGAAGAATTTGA | |
| | CAAGCTTCATCAAAAGTATTGCCTCAAATCTCCTGGGCAGATGACAGTGCCTTTATGTATTGGAGTGTCT | |
| | ACAGATAAAGCAAGTATGGAAGTTCGATATCAAACAGAAGGCTTCTTAGGAAAATTAAATCCAGACCCTC | |
| | ACTTCCAGGGTTTCCAGAAGTTGCCATCATCACCCCTGGGGTGCAGAAAAAGTCTACTGGGCTCAACTGC | |
| | AATTGAGGCTCCTTCATCTACATGTGTTGCTCGTGCCATCACGAGGGATGGCACGAGGGACCATCAGTTC | |
| | CCTGCAAAAAGACCCAGGCTATCAGAACCCCAGGGCTCCGGACGCCAGGGCAATTCCCTGGGTGCCTCAG | |
| | ATGGGGTGGACAACACCGTCAGACCGGGAGACCAGGGCAGCTCTTCACAGCCCAACTCAGAAGAGAGAGG | |
| | AGAGAACACGTCTTACAGGATGGAAGAGAAAAGTGATTTCATGCTAGAAAAATTGGAAACTAAAAGTGTG | |
| | TAGCTAGGTTATTTCGGAGTGTTATTTATCTTCCCACTTGCTCTCTGTTTGTATTTTTGTTTTGTTTTTG | |
| | ATTCTTGAGACTGTGAGGACTTGGTTGACTTCTCTGCCCTTAAAGTAAATATTAGTGAAATTGGTTCCAT | |
| | CAGAGATAACCTCGAGTTCTTGGTGTAGAAATTATGTGAATAAAGTTGCTCAATTAGAATTTTTAGGGTT | |
| | CTCTTTGATAGGCCTGTTTTTCTGATGTGTGTGTTTTTTTTGGGGGGGGGTTATTTGTTTGTTTGTTTGT | |
| | TTGTTTGTTTGTTTTTGAGACAGTCTCTCTCTATCGCCCAGGCTGGAGTGCGGTGGCACAATCTTGGCTC | |
| | ACTGCAACTTCCGCCTCCCGGGTTCAAGCGATTCTTCTGCCTCAGCCTCCCGAGTAGCTGGGATTACAGG | |
| | CGCGCGCCACCACGCCTGGCTAATTTTTGTAGTTTTAGTAGAGACGGGGTTTCACCATATTGACCAGGCT | |
| | GGTCTCGAGCTCCTGGCCTCGTGATCCATCTGCCTCGGCCTCCCAAAGTGCTGGGATTATAGGCGTGAGC | |
| | CACTGCTCCCAGCCGTGTGTTCTTTTTTAAATTTAGATATGTCCAGAGAATCCTCTCTCCTGTTTCCCAT | |
| | TTCATTCGAGAATATTGTTTGCTTGTGAGACGTAAGTTCGAGCCCTGCATGCAATGACCCTTGAAGGAAA | |
| | ATAAACAGTCCTGGTGGTCCCAGACGCTCCTGCAGCCACAAAAAAAAAAAAAAAA | |
| BIRC5 | CCCAGAAGGCCGCGGGGGGTGGACCGCCTAAGAGGGCGTGCGCTCCCGACATGCCCCGCGGCGCGCCATT | 91 |
| NM_001168.2 | AACCGCCAGATTTGAATCGCGGGACCCGTTGGCAGAGGTGGCGGCGGCGGCATGGGTGCCCCGACGTTGC | |
| | CCCCTGCCTGGCAGCCCTTTCTCAAGGACCACCGCATCTCTACATTCAAGAACTGGCCCTTCTTGGAGGG | |
| | CTGCGCCTGCACCCCGGAGCGGATGGCCGAGGCTGGCTTCATCCACTGCCCCACTGAGAACGAGCCAGAC | |
| | TTGGCCCAGTGTTTCTTCTGCTTCAAGGAGCTGGAAGGCTGGGAGCCAGATGACGACCCCATAGAGGAAC | |
| | ATAAAAAGCATTCGTCCGGTTGCGCTTTCCTTTCTGTCAAGAAGCAGTTTGAAGAATTAACCCTTGGTGA | |
| | ATTTTTGAAACTGGACAGAGAAAGAGCCAAGAACAAAATTGCAAAGGAAACCAACAATAAGAAGAAAGAA | |
| | TTTGAGGAAACTGCGGAGAAAGTGCGCCGTGCCATCGAGCAGCTGGCTGCCATGGATTGAGGCCTCTGGC | |
| | CGGAGCTGCCTGGTCCCAGAGTGGCTGCACCACTTCCAGGGTTTATTCCCTGGTGCCACCAGCCTTCCTG | |
| | TGGGCCCCTTAGCAATGTCTTAGGAAAGGAGATCAACATTTTCAAATTAGATGTTTCAACTGTGCTCTTG | |
| | TTTTGTCTTGAAAGTGGCACCAGAGGTGCTTCTGCCTGTGCAGCGGGTGCTGCTGGTAACAGTGGCTGCT | |
| | TCTCTCTCTCTCTCTCTTTTTTGGGGGCTCATTTTTGCTGTTTTGATTCCCGGGCTTACCAGGTGAGAAG | |
| | TGAGGGAGGAAGAAGGCAGTGTCCCTTTTGCTAGAGCTGACAGCTTTGTTCGCGTGGGCAGAGCCTTCCA | |
| | CAGTGAATGTGTCTGGACCTCATGTTGTTGAGGCTGTCACAGTCCTGAGTGTGGACTTGGCAGGTGCCTG | |
| | TTGAATCTGAGCTGCAGGTTCCTTATCTGTCACACCTGTGCCTCCTCAGAGGACAGTTTTTTTGTTGTTG | |
| | TGTTTTTTTGTTTTTTTTTTTTTGGTAGATGCATGACTTGTGTGTGATGAGAGAATGGAGACAGAGTCCC | |
| | TGGCTCCTCTACTGTTTAACAACATGGCTTTCTTATTTTGTTTGAATTGTTAATTCACAGAATAGCACAA | |
| | ACTACAATTAAAACTAAGCACAAAGCCATTCTAAGTCATTGGGGAAACGGGGTGAACTTCAGGTGGATGA | |
| | GGAGACAGAATAGAGTGATAGGAAGCGTCTGGCAGATACTCCTTTTGCCACTGCTGTGTGATTAGACAGG | |
| | CCCAGTGAGCCGCGGGGCACATGCTGGCCGCTCCTCCCTCAGAAAAAGGCAGTGGCCTAAATCCTTTTTA | |
| | AATGACTTGGCTCGATGCTGTGGGGGACTGGCTGGGCTGCTGCAGGCCGTGTGTCTGTCAGCCCAACCTT | |
| | CACATCTGTCACGTTCTCCACACGGGGGAGAGACGCAGTCCGCCCAGGTCCCCGCTTTCTTTGGAGGCAG | |
| | CAGCTCCCGCAGGGCTGAAGTCTGGCGTAAGATGATGGATTTGATTCGCCCTCCTCCCTGTCATAGAGCT | |
| | GCAGGGTGGATTGTTACAGCTTCGCTGGAAACCTCTGGAGGTCATCTCGGCTGTTCCTGAGAAATAAAAA | |
| | GCCTGTCATTTCAAACACTGCTGTGGACCCTACTGGGTTTTTAAAATATTGTCAGTTTTTCATCGTCGTC | |
| | CCTAGCCTGCCAACAGCCATCTGCCCAGACAGCCGCAGTGAGGATGAGCGTCCTGGCAGAGACGCAGTTG | |
| | TCTCTGGGCGCTTGCCAGAGCCACGAACCCCAGACCTGTTTGTATCATCCGGGCTCCTTCCGGGCAGAAA | |
| | CAACTGAAAATGCACTTCAGACCCACTTATTTCTGCCACATCTGAGTCGGCCTGAGATAGACTTTTCCCT | |
| | CTAAACTGGGAGAATATCACAGTGGTTTTTGTTAGCAGAAAATGCACTCCAGCCTCTGTACTCATCTAAG | |
| | CTGCTTATTTTTGATATTTGTGTCAGTCTGTAAATGGATACTTCACTTTAATAACTGTTGCTTAGTAATT | |
| | GGCTTTGTAGAGAAGCTGGAAAAAAATGGTTTTGTCTTCAACTCCTTTGCATGCCAGGCGGTGATGTGGA | |
| | TCTCGGCTTCTGTGAGCCTGTGCTGTGGGCAGGGCTGAGCTGGAGCCGCCCCTCTCAGCCCGCCTGCCAC | |
| | GGCCTTTCCTTAAAGGCCATCCTTAAAACCAGACCCTCATGGCTACCAGCACCTGAAAGCTTCCTCGACA | |
| | TCTGTTAATAAAGCCGTAGGCCCTTGTCTAAGTGCAACCGCCTAGACTTTCTTTCAGATACATGTCCACA | |
| | TGTCCATTTTTCAGGTTCTCTAAGTTGGAGTGGAGTCTGGGAAGGGTTGTGAATGAGGCTTCTGGGCTAT | |
| | GGGTGAGGTTCCAATGGCAGGTTAGAGCCCCTCGGGCCAACTGCCATCCTGGAAAGTAGAGACAGCAGTG | |
| | CCCGCTGCCCAGAAGAGACCAGCAAGCCAAACTGGAGCCCCCATTGCAGGCTGTCGCCATGTGGAAAGAG | |
| | TAACTCACAATTGCCAATAAAGTCTCATGTGGTTTTATCTAAAAAAAAAAAAAAAAAAAAAAAAA | |
| ANLN | CTCGGCGCTGAAATTCAAATTTGAACGGCTGCAGAGGCCGAGTCCGTCACTGGAAGCCGAGAGGAGAGGA | 92 |
| NM_018685.2 | CAGCTGGTTGTGGGAGAGTTCCCCCGCCTCAGACTCCTGGTTTTTTCCAGGAGACACACTGAGCTGAGAC | |
| | TCACTTTTCTCTTCCTGAATTTGAACCACCGTTTCCATCGTCTCGTAGTCCGACGCCTGGGGCGATGGAT | |
| | CCGTTTACGGAGAAACTGCTGGAGCGAACCCGTGCCAGGCGAGAGAATCTTCAGAGAAAAATGGCTGAGA | |
| | GGCCCACAGCAGCTCCAAGGTCTATGACTCATGCTAAGCGAGCTAGACAGCCACTTTCAGAAGCAAGTAA | |
| | CCAGCAGCCCCTCTCTGGTGGTGAAGAGAAATCTTGTACAAAACCATCGCCATCAAAAAAACGCTGTTCT | |
| | GACAACACTGAAGTAGAAGTTTCTAACTTGGAAAATAAACAACCAGTTGAGTCGACATCTGCAAAATCTT | |
| | GTTCTCCAAGTCCTGTGTCTCCTCAGGTGCAGCCACAAGCAGCAGATACCATCAGTGATTCTGTTGCTGT | |
| | CCCGGCATCACTGCTGGGCATGAGGAGAGGGCTGAACTCAAGATTGGAAGCAACTGCAGCCTCCTCAGTT | |
| | AAAACACGTATGCAAAAACTTGCAGAGCAACGGCGCCGTTGGGATAATGATGATATGACAGATGACATTC | |
| | CTGAAAGCTCACTCTTCTCACCAATGCCATCAGAGGAAAAGGCTGCTTCCCCTCCCAGACCTCTGCTTTC | |
| | AAATGCCTCGGCAACTCCAGTTGGCAGAAGGGGCCGTCTGGCCAATCTTGCTGCAACTATTTGCTCCTGG | |
| | GAAGATGATGTAAATCACTCATTTGCAAAACAAAACAGTGTACAAGAACAGCCTGGTACCGCTTGTTTAT | |
| | CCAAATTTTCCTCTGCAAGTGGAGCATCTGCTAGGATCAATAGCAGCAGTGTTAAGCAGGAAGCTACATT | |
| | CTGTTCCCAAAGGGATGGCGATGCCTCTTTGAATAAAGCCCTATCCTCAAGTGCTGATGATGCGTCTTTG | |
| | GTTAATGCCTCAATTTCCAGCTCTGTGAAAGCTACTTCTCCAGTGAAATCTACTACATCTATCACTGATG | |
| | CTAAAAGTTGTGAGGGACAAAATCCTGAGCTACTTCCAAAAACTCCTATTAGTCCTCTGAAAACGGGGGT | |
| | ATCGAAACCAATTGTGAAGTCAACTTTATCCCAGACAGTTCCATCCAAGGGAGAATTAAGTAGAGAAATT | |
| | TGTCTGCAATCTCAATCTAAAGACAAATCTACGACACCAGGAGGAACAGGAATTAAGCCTTTCCTGGAAC | |
| | GCTTTGGAGAGCGTTGTCAAGAACATAGCAAAGAAAGTCCAGCTCGTAGCACACCCCACAGAACCCCCAT | |
| | TATTACTCCAAATACAAAGGCCATCCAAGAAAGATTATTCAAGCAAGACACATCTTCATCTACTACCCAT | |
| | TTAGCACAACAGCTCAAGCAGGAACGTCAAAAAGAACTAGCATGTCTTCGTGGCCGATTTGACAAGGGCA | |
| | ATATATGGAGTGCAGAAAAAGGCGGAAACTCAAAAAGCAAACAACTAGAAACCAAACAGGAAACTCACTG | |
| | TCAGAGCACTCCCCTCAAAAAACACCAAGGTGTTTCAAAAACTCAGTCACTTCCAGTAACAGAAAAGGTG | |
| | ACCGAAAACCAGATACCAGCCAAAAATTCTAGTACAGAACCTAAAGGTTTCACTGAATGCGAAATGACGA | |
| | AATCTAGCCCTTTGAAAATAACATTGTTTTTAGAAGAGGACAAATCCTTAAAAGTAACATCAGACCCAAA | |
| | GGTTGAGCAGAAAATTGAAGTGATACGTGAAATTGAGATGAGTGTGGATGATGATGATATCAATAGTTCG | |
| | AAAGTAATTAATGACCTCTTCAGTGATGTCCTAGAGGAAGGTGAACTAGATATGGAGAAGAGCCAAGAGG | |
| | AGATGGATCAAGCATTAGCAGAAAGCAGCGAAGAACAGGAAGATGCACTGAATATCTCCTCAATGTCTTT | |
| | ACTTGCACCATTGGCACAAACAGTTGGTGTGGTAAGTCCAGAGAGTTTAGTGTCCACACCTAGACTGGAA | |
| | TTGAAAGACACCAGCAGAAGTGATGAAAGTCCAAAACCAGGAAAATTCCAAAGAACTCGTGTCCCTCGAG | |
| | CTGAATCTGGTGATAGCCTTGGTTCTGAAGATCGTGATCTTCTTTACAGCATTGATGCATATAGATCTCA | |
| | AAGATTCAAAGAAACAGAACGTCCATCAATAAAGCAGGTGATTGTTCGGAAGGAAGATGTTACTTCAAAA | |
| | CTGGATGAAAAAAATAATGCCTTTCCTTGTCAAGTTAATATCAAACAGAAAATGCAGGAACTCAATAACG | |
| | AAATAAATATGCAACAGACAGTGATCTATCAAGCTAGCCAGGCTCTTAACTGCTGTGTTGATGAAGAACA | |
| | TGGAAAAGGGTCCCTAGAAGAAGCTGAAGCAGAAAGACTTCTTCTAATTGCAACTGGGAAGAGAACACTT | |
| | TTGATTGATGAATTGAATAAATTGAAGAACGAAGGACCTCAGAGGAAGAATAAGGCTAGTCCCCAAAGTG | |
| | AATTTATGCCATCCAAAGGATCAGTTACTTTGTCAGAAATCCGCTTGCCTCTAAAAGCAGATTTTGTCTG | |
| | CAGTACGGTTCAGAAACCAGATGCAGCAAATTACTATTACTTAATTATACTAAAAGCAGGAGCTGAAAAT | |
| | ATGGTAGCCACACCATTAGCAAGTACTTCAAACTCTCTTAACGGTGATGCTCTGACATTCACTACTACAT | |
| | TTACTCTGCAAGATGTATCCAATGACTTTGAAATAAATATTGAAGTTTACAGCTTGGTGCAAAAGAAAGA | |
| | TCCCTCAGGCCTTGATAAGAAGAAAAAAACATCCAAGTCCAAGGCTATTACTCCAAAGCGACTCCTCACA | |
| | TCTATAACCACAAAAAGCAACATTCATTCTTCAGTCATGGCCAGTCCAGGAGGTCTTAGTGCTGTGCGAA | |
| | CCAGCAACTTCGCCCTTGTTGGATCTTACACATTATCATTGTCTTCAGTAGGAAATACTAAGTTTGTTCT | |
| | GGACAAGGTCCCCTTTTTATCTTCTTTGGAAGGTCATATTTATTTAAAAATAAAATGTCAAGTGAATTCC | |
| | AGTGTTGAAGAAAGAGGTTTTCTAACCATATTTGAAGATGTTAGTGGTTTTGGTGCCTGGCATCGAAGAT | |
| | GGTGTGTTCTTTCTGGAAACTGTATATCTTATTGGACTTATCCAGATGATGAGAAACGCAAGAATCCCAT | |
| | AGGAAGGATAAATCTGGCTAATTGTACCAGTCGTCAGATAGAACCAGCCAACAGAGAATTTTGTGCAAGA | |
| | CGCAACACTTTTGAATTAATTACTGTCCGACCACAAAGAGAAGATGACCGAGAGACTCTTGTCAGCCAAT | |
| | GCAGGGACACACTCTGTGTTACCAAGAACTGGCTGTCTGCAGATACTAAAGAAGAGCGGGATCTCTGGAT | |
| | GCAAAAACTCAATCAAGTTCTTGTTGATATTCGCCTCTGGCAACCTGATGCTTGCTACAAACCTATTGGA | |
| | AAGCCTTAAACCGGGAAATTTCCATGCTATCTAGAGGTTTTTGATGTCATCTTAAGAAACACACTTAAGA | |
| | GCATCAGATTTACTGATTGCATTTTATGCTTTAAGTACGAAAGGGTTTGTGCCAATATTCACTACGTATT | |
| | ATGCAGTATTTATATCTTTTGTATGTAAAACTTTAACTGATTTCTGTCATTCATCAATGAGTAGAAGTAA | |
| | ATACATTATAGTTGATTTTGCTAAATCTTAATTTAAAAGCCTCATTTTCCTAGAAATCTAATTATTCAGT | |
| | TATTCATGACAATATTTTTTTAAAAGTAAGAAATTCTGAGTTGTCTTCTTGGAGCTGTAGGTCTTGAAGC | |
| | AGCAACGTCTTTCAGGGGTTGGAGACAGAAACCCATTCTCCAATCTCAGTAGTTTTTTCGAAAGGCTGTG | |
| | ATCATTTATTGATCGTGATATGACTTGTTACTAGGGTACTGAAAAAAATGTCTAAGGCCTTTACAGAAAC | |
| | ATTTTTAGTAATGAGGATGAGAACTTTTTCAAATAGCAAATATATATTGGCTTAAAGCATGAGGCTGTCT | |
| | TCAGAAAAGTGATGTGGACATAGGAGGCAATGTGTGAGACTTGGGGGTTCAATATTTTATATAGAAGAGT | |
| | TAATAAGCACATGGTTTACATTTACTCAGCTACTATATATGCAGTGTGGTGCACATTTTCACAGAATTCT | |
| | GGCTTCATTAAGATCATTATTTTTGCTGCGTAGCTTACAGACTTAGCATATTAGTTTTTTCTACTCCTAC | |
| | AAGTGTAAATTGAAAAATCTTTATATTAAAAAAGTAAACTGTTATGAAGCTGCTATGTACTAATAATACT | |
| | TTGCTTGCCAAAGTGTTTGGGTTTTGTTGTTGTTTGTTTGTTTGTTTGTTTTTGGTTCATGAACAACAGT | |
| | GTCTAGAAACCCATTTTGAAAGTGGAAAATTATTAAGTCACCTATCACCTTTAAACGCCTTTTTTTAAAA | |
| | TTATAAAATATTGTAAAGCAGGGTCTCAACTTTTAAATACACTTTGAACTTCTTCTCTGAATTATTAAAG | |
| | TTCTTTATGACCTCATTTATAAACACTAAATTCTGTCACCTCCTGTCATTTTATTTTTTATTCATTCAAA | |
| | TGTATTTTTTCTTGTGCATATTATAAAAATATATTTTATGAGCTCTTACTCAAATAAATACCTGTAAATG | |
| | TCTAAAGGAAAAAAAAAAAAAAAAAA | |
| CEP55 | CACACCTGATGGTGTGACTCGGCCGACGCGAGCGCCGCGCTTCGCTTCAGCTGCTAGCTGGCCCAAGGGA | 93 |
| NM_018131.4 | GGCGACCGCGGAGGGTGGCGAGGGGCGGCCAGGACCCGCAGCCCCGGGGCCGGGCCGGTCCGGACCGCCA | |
| | GGGAGGGCAGGTCAGTGGGCAGATCGCGTCCGCGGGATTCAATCTCTGCCCGCTCTGATAACAGTCCTTT | |
| | TCCCTGGCGCTCACTTCGTGCCTGGCACCCGGCTGGGCGCCTCAAGACCGTTGTCTCTTCGATCGCTTCT | |
| | TTGGACTTGGCGACCATTTCAGAGATGTCTTCCAGAAGTACCAAAGATTTAATTAAAAGTAAGTGGGGAT | |
| | CGAAGCCTAGTAACTCCAAATCCGAAACTACATTAGAAAAATTAAAGGGAGAAATTGCACACTTAAAGAC | |
| | ATCAGTGGATGAAATCACAAGTGGGAAAGGAAAGCTGACTGATAAAGAGAGACACAGACTTTTGGAGAAA | |
| | ATTCGAGTCCTTGAGGCTGAGAAGGAGAAGAATGCTTATCAACTCACAGAGAAGGACAAAGAAATACAGC | |
| | GACTGAGAGACCAACTGAAGGCCAGATATAGTACTACCGCATTGCTTGAACAGCTGGAAGAGACAACGAG | |
| | AGAAGGAGAAAGGAGGGAGCAGGTGTTGAAAGCCTTATCTGAAGAGAAAGACGTATTGAAACAACAGTTG | |
| | TCTGCTGCAACCTCACGAATTGCTGAACTTGAAAGCAAAACCAATACACTCCGTTTATCACAGACTGTGG | |
| | CTCCAAACTGCTTCAACTCATCAATAAATAATATTCATGAAATGGAAATACAGCTGAAAGATGCTCTGGA | |
| | GAAAAATCAGCAGTGGCTCGTGTATGATCAGCAGCGGGAAGTCTATGTAAAAGGACTTTTAGCAAAGATC | |
| | TTTGAGTTGGAAAAGAAAACGGAAACAGCTGCTCATTCACTCCCACAGCAGACAAAAAAGCCTGAATCAG | |
| | AAGGTTATCTTCAAGAAGAGAAGCAGAAATGTTACAACGATCTCTTGGCAAGTGCAAAAAAAGATCTTGA | |
| | GGTTGAACGACAAACCATAACTCAGCTGAGTTTTGAACTGAGTGAATTTCGAAGAAAATATGAAGAAACC | |
| | CAAAAAGAAGTTCACAATTTAAATCAGCTGTTGTATTCACAAAGAAGGGCAGATGTGCAACATCTGGAAG | |
| | ATGATAGGCATAAAACAGAGAAGATACAAAAACTCAGGGAAGAGAATGATATTGCTAGGGGAAAACTTGA | |
| | AGAAGAGAAGAAGAGATCCGAAGAGCTCTTATCTCAGGTCCAGTTTCTTTACACATCTCTGCTAAAGCAG | |
| | CAAGAAGAACAAACAAGGGTAGCTCTGTTGGAACAACAGATGCAGGCATGTACTTTAGACTTTGAAAATG | |
| | AAAAACTCGACCGTCAACATGTGCAGCATCAATTGCATGTAATTCTTAAGGAGCTCCGAAAAGCAAGAAA | |
| | TCAAATAACACAGTTGGAATCCTTGAAACAGCTTCATGAGTTTGCCATCACAGAGCCATTAGTCACTTTC | |
| | CAAGGAGAGACTGAAAACAGAGAAAAAGTTGCCGCCTCACCAAAAAGTCCCACTGCTGCACTCAATGAAA | |
| | GCCTGGTGGAATGTCCCAAGTGCAATATACAGTATCCAGCCACTGAGCATCGCGATCTGCTTGTCCATGT | |
| | GGAATACTGTTCAAAGTAGCAAAATAAGTATTTGTTTTGATATTAAAAGATTCAATACTGTATTTTCTGT | |
| | TAGCTTGTGGGCATTTTGAATTATATATTTCACATTTTGCATAAAACTGCCTATCTACCTTTGACACTCC | |
| | AGCATGCTAGTGAATCATGTATCTTTTAGGCTGCTGTGCATTTCTCTTGGCAGTGATACCTCCCTGACAT | |
| | GGTTCATCATCAGGCTGCAATGACAGAATGTGGTGAGCAGCGTCTACTGAGACTACTAACATTTTGCACT | |
| | GTCAAAATACTTGGTGAGGAAAAGATAGCTCAGGTTATTGCTAATGGGTTAATGCACCAGCAAGCAAAAT | |
| | ATTTTATGTTTTGGGGGTTTTGAAAAATCAAAGATAATTAACCAAGGATCTTAACTGTGTTCGCATTTTT | |
| | TATCCAAGCACTTAGAAAACCTACAATCCTAATTTTGATGTCCATTGTTAAGAGGTGGTGATAGATACTA | |
| | TTTTTTTTTTCATATTGTATAGCGGTTATTAGAAAAGTTGGGGATTTTCTTGATCTTTATTGCTGCTTAC | |
| | CATTGAAACTTAACCCAGCTGTGTTCCCCAACTCTGTTCTGCGCACGAAACAGTATCTGTTTGAGGCATA | |
| | ATCTTAAGTGGCCACACACAATGTTTTCTCTTATGTTATCTGGCAGTAACTGTAACTTGAATTACATTAG | |
| | CACATTCTGCTTAGCTAAAATTGTTAAAATAAACTTTAATAAACCCATGTAGCCCTCTCATTTGATTGAC | |
| | AGTATTTTAGTTATTTTTGGCATTCTTAAAGCTGGGCAATGTAATGATCAGATCTTTGTTTGTCTGAACA | |
| | GGTATTTTTATACATGCTTTTTGTAAACCAAAAACTTTTAAATTTCTTCAGGTTTTCTAACATGCTTACC | |
| | ACTGGGCTACTGTAAATGAGAAAAGAATAAAATTATTTAATGTTTTAAAAAAAAAAAAAAAAAAAA | |
| REEP6 | GGAGCATCGCGGCTCAGGCTGCGGGAAAGCGGTGCGCGTGCAGCGGGGTGGGTGCCCTGGTCCGCGGGCG | 94 |
| NM_138393.1 | AGCTCGAGCAGCCAACCCCGGGCGCGTCGGGGCCATGGACGGCCTGAGGCAGCGCGTGGAGCACTTCCTG | |
| | GAGCAAAGGAACCTGGTCACCGAAGTGCTGGGGGCGCTGGAGGCCAAGACCGGGGTGGAGAAGCGGTATC | |
| | TGGCTGCAGGAGCCGTCACTCTGCTAAGCCTGTATCTGCTGTTCGGCTACGGAGCGTCTCTGCTGTGCAA | |
| | TCTCATCGGATTTGTGTACCCCGCATATGCCTCAATCAAAGCTATCGAGAGCCCAAGCAAGGACGACGAC | |
| | ACTGTGTGGCTCACCTACTGGGTGGTGTACGCCCTGTTTGGGCTGGCCGAGTTCTTCAGCGATCTACTCC | |
| | TGTCCTGGTTCCCTTTCTACTACGTGGGCAAGTGCGCCTTCCTGTTGTTCTGCATGGCTCCCAGGCCCTG | |
| | GAACGGGGCTCTCATGCTGTATCAGCGCGTCGTGCGTCCGCTGTTCCTAAGGCACCACGGGGCCGTAGAC | |
| | AGAATCATGAACGACCTCAGCGGGCGAGCCCTGGACGCGGCGGCCGGAATAACCAGGAACGTCAAGCCAA | |
| | GCCAGACCCCGCAGCCGAAGGACAAGTGAAGCAGCCCCCTGAGCCTCACAAGGACCTCCTGGCTGGTGAG | |
| | GAGGGGGCCGCGCCAGGCTCCCAGGCCTCCACAGAGTCTTCAGCGCATCCCCCAACAGCAGCCCCTGCCA | |
| | GTCCCTCGGGTCCAGGCAAGGCCCTGGGGGTCTCCTTAAATGCCACCTCGGGCAAGTCCCAGTCCCAGTC | |
| | CTCGGCCACCCCCAGCTCTGGATCCCAGGGCCAGCTGCCCTCTGGCTCTGGCTGTGGCTCCCGCCTGTCC | |
| | GGCAGGGCCCAGGGCCAGCGTCGGGCACAGGGCAGCTCCCACTGGTCTCGGCAACACACCCAGCCGCCTG | |
| | GTACTTCCTCCAGCCCCTCCCAGTCAGCCCTCCCGTCCTCGGGGCCCCTGCAGCCACCCAACGTCACCTC | |
| | CAGCCCGGTCTCACCCATGGTCCAGTCTCCCAGCAGCAGCAACATCCCCACGCAGCCCCCCAGCAAGTCC | |
| | TCTGGCAAGCCGGAGGACGCAGCCCCCAAGACCAGCGGACAGCGCCAGAAGGAATCGTCGAAACAGCCTG | |
| | CCAGCAGCGCCTCAGTGCCCGAGCTGGTCCCCTGCCATTCCGGGACCTCTCTGGAGTACACTTCGGAGTC | |
| | CACCACCGAGATCACCTGCAGCTGGCCACACCACAGGCCCCCGTGCCTGCAGCACTACTGGTGCCTGAAA | |
| | CACCTGGCCTGCTAGGAGGCTCCAATAAAGCTAACCCGGACCAAAAAAAAAAAAAAAAAAAAA | |
| ELOVL5 | AAAAAAATTTCCCAGAGACACGTGGAACCGAGGGGCCAACCCCGGCCTAGGCTCTCCACCGCATCGGATT | 95 |
| NM_021814.4 | CTGGAATTTACGATCACGAAAGTTCTATTGTCCCGCGATTGGCTCCCGGGCCGCATGACATCATAGCGCT | |
| | TGATTCATCCTTCGGGTCCCGATTGGCTGGCCGCGCCATTGTGACGTCACGGTCAGCCCACGTTCTGATT | |
| | GTAGATAGCCGGCGCCTTCCTCTTCCCATCGCGCGGGTCCTAGCCACCGGTGTCTCCTTCTACATCCGCC | |
| | TCTGCGCCGGCTGCCACCCGCGCTCCCTCCGCCGCCGCCGCCTTGCTGCTGCTCAAAGCTGCTGCCGCCC | |
| | CTTGGGCTAAAAGGTTTTCAAATGGAACATTTTGATGCATCACTTAGTACCTATTTCAAGGCATTGCTAG | |
| | GCCCTCGAGATACTAGAGTAAAAGGATGGTTTCTTCTGGACAATTATATACCCACATTTATCTGCTCTGT | |
| | CATATATTTACTAATTGTATGGCTGGGACCAAAATACATGAGGAATAAACAGCCATTCTCTTGCCGGGGG | |
| | ATTTTAGTGGTGTATAACCTTGGACTCACACTGCTGTCTCTGTATATGTTCTGTGAGTTAGTAACAGGAG | |
| | TATGGGAAGGCAAATACAACTTCTTCTGTCAGGGCACACGCACCGCAGGAGAATCAGATATGAAGATTAT | |
| | CCGTGTCCTCTGGTGGTACTACTTCTCCAAACTCATAGAATTTATGGACACTTTCTTCTTCATCCTGCGC | |
| | AAGAACAACCACCAGATCACGGTCCTGCACGTCTACCACCATGCCTCGATGCTGAACATCTGGTGGTTTG | |
| | TGATGAACTGGGTCCCCTGCGGCCACTCTTATTTTGGTGCCACACTTAATAGCTTCATCCACGTCCTCAT | |
| | GTACTCTTACTATGGTTTGTCGTCAGTCCCTTCCATGCGTCCATACCTCTGGTGGAAGAAGTACATCACT | |
| | CAGGGGCAGCTGCTTCAGTTTGTGCTGACAATCATCCAGACCAGCTGCGGGGTCATCTGGCCGTGCACAT | |
| | TCCCTCTTGGTTGGTTGTATTTCCAGATTGGATACATGATTTCCCTGATTGCTCTCTTCACAAACTTCTA | |
| | CATTCAGACCTACAACAAGAAAGGGGCCTCCCGAAGGAAAGACCACCTGAAGGACCACCAGAATGGGTCC | |
| | ATGGCTGCTGTGAATGGACACACCAACAGCTTTTCACCCCTGGAAAACAATGTGAAGCCAAGGAAGCTGC | |
| | GGAAGGATTGAAGTCAAAGAATTGAAACCCTCCAAACCACGTCATCTGATTGTAAGCACAATATGAGTTG | |
| | TGCCCCAATGCTCGTTAACAGCTGCTGTAACTAGTCTGGCCTACAATAGTGTGATTCATGTAGGACTTCT | |
| | TTCATCAATTCAAAACCCCTAGAAAACGTATACAGATTATATAAGTAGGGATAAGATTTCTAACATTTCT | |
| | GGGCTCTCTGACCCCTGCGCTAGACTGTGGAAAGGGAGTATTATTATAGTATACAACACTGCTGTTGCCT | |
| | TATTAGTTATAACATGATAGGTGCTGAATTGTGATTCACAATTTAAAAACACTGTAATCCAAACTTTTTT | |
| | TTTTAACTGTAGATCATGCATGTGATTGTAAATGTAAATTTGTACAATGTTGTTATGGTAGAGAAACACA | |
| | CATGCCTTAAAATTTAAAAAGCAGGGCCCAAAGCTTATTAGTTTAAATTAGGGTATGTTTCAAGTTTGTA | |
| | TTAATTTGTAATAGCTCTGTTTAGAAAAAATCAAAGACCATGATTTATGAAACTAATGTGACATAATTTC | |
| | CAGTGACTTGTTGATGTGAAATCAGACACGGCACCTTCAGTTTTGTACTATTGGCTTTGAATCAAGCAGG | |
| | CTCAAATCTAGTGGAACAGTCAGTTTAACTTTTTAACAGATCTTATTTTTTTATTTTGAGTGCCACTATT | |
| | AATGTAAAAAGGGGGGGGCTCTACAGCAGTCGTGATGAAACTTAAATATATATTCTTTGTCCTCGAGATT | |
| | TTAGGAAGGGTGTAGGGTGAGTAGGCCATTTTTAATTTCTGAAGTGCTAAGTGTTTTTATACAGCAAACA | |
| | AAAAGTCAATTTTGCTTTCCACCAGTGCGAGAGAGGATGTATACTTTTCAAGAGAGATGATTGCCTATTT | |
| | ACCGTTTGACAGAGTCCCGTAGATGAGCAATGGGGAACTGGTTGCCAGGGTCTAAATTTGGATTGATTTA | |
| | TGCACTGTTATCTGTTTTGACACAGATTTCCTTGTAAAATGTGCCTAGTTTACCAAAATTAACAAAGGGG | |
| | GGGAAAGGACCTTAGAACTTTTTAAGGTAAAATCAAATATAGCTACAGCATAAGAGAATCGAGAAATTTG | |
| | ATAGAGGTAACTTGTTTAATGTAAATCTAATAGTACTTGTAATTTCTTTCTGCTTAGAATCTAAAGATGT | |
| | GTTTAGAACCTCTTGTTTAAAAATAATAGACTGCTTATCATAAAATCACATCTCACACATTTGAGGCAGT | |
| | GGTCAAACAGGTAAAGCCTATGATGTGTGTCATTTTAAAGTGTCGGAATTTAGCCTCTGAATACCTTCTC | |
| | CATTGGGGGAAAGATATTCTTGGAACCACTCATGACATATCTTAGAAGGTCATTGACAATGTATAAACTA | |
| | ATTGTTGGTTTGATATTTATGTAAATATCAGTTTACCATGCTTTAATTTTGCACATTCGTACTATAGGGA | |
| | GCCTATTGGTTCTCTATTAGTCTTGTGGGTTTTCTGTTTGAAAAGGAGTCATGGCATCTGTTTACATTTA | |
| | CCTTATCAAACCTAGAATGTGTATATTTATAAATGTATGTCTTCATTGCTAGGTACTAATTTGCAGATGT | |
| | CTTTACATATTTCAATACAGAAACTATAACATTCAATAGTGTGCTGTCAAAGTGTGCTTAGCTCACCTGG | |
| | ATATACCTACATTGTTAAATGTCTAAACAGTAATCATTAAAACATTTTTGATTACCTGTGAAAAAAAAAA | |
| | AAAAAAAAAAAAAAAAAAAAAAAAAAAA | |
| TMEM45B | ACGCACTTGGCGCGCGGCGCGGGCTGCAGACGGCTGCGAGGCGCTGGGCACAGGTGTCCTGATGGCAAAT | 96 |
| NM_138788.3 | TTCAAGGGCCACGCGCTTCCAGGGAGTTTCTTCCTGATCATTGGGCTGTGTTGGTCAGTGAAGTACCCGC | |
| | TGAAGTACTTTAGCCACACGCGGAAGAACAGCCCACTACATTACTATCAGCGTCTCGAGATCGTCGAAGC | |
| | CGCAATTAGGACTTTGTTTTCCGTCACTGGGATCCTGGCAGAGCAGTTTGTTCCGGATGGGCCCCACCTG | |
| | CACCTCTACCATGAGAACCACTGGATAAAGTTAATGAATTGGCAGCACAGCACCATGTACCTATTCTTTG | |
| | CAGTCTCAGGAATTGTTGACATGCTCACCTATCTGGTCAGCCACGTTCCCTTGGGGGTGGACAGACTGGT | |
| | TATGGCTGTGGCAGTATTCATGGAAGGTTTCCTCTTCTACTACCACGTCCACAACCGGCCTCCGCTGGAC | |
| | CAGCACATCCACTCACTCCTGCTGTATGCTCTGTTCGGAGGGTGTGTTAGTATCTCCCTAGAGGTGATCT | |
| | TCCGGGACCACATTGTGCTGGAACTTTTCCGAACCAGTCTCATCATTCTTCAGGGAACCTGGTTCTGGCA | |
| | GATTGGGTTTGTGCTGTTCCCACCTTTTGGAACACCCGAATGGGACCAGAAGGATGATGCCAACCTCATG | |
| | TTCATCACCATGTGCTTCTGCTGGCACTACCTGGCTGCCCTCAGCATTGTGGCCGTCAACTATTCTCTTG | |
| | TTTACTGCCTTTTGACTCGGATGAAGAGACACGGAAGGGGAGAAATCATTGGAATTCAGAAGCTGAATTC | |
| | AGATGACACTTACCAGACCGCCCTCTTGAGTGGCTCAGATGAGGAATGAGCCGAGATGCGGAGGGCGCAG | |
| | ATGTCCCACTGCACAGCTGGAATGAATGGAGTTCATCCCCTCCACCTGAATGCCTGCTGTGGTCTGATCT | |
| | TAAGGGTCTATATATTTGCACCTCCTCATTCAACACAGGGCTGGAGGTTCTACAACAGGAAATCAGGCCT | |
| | ACAGCATCCTGTGTATCTTGCAGTTGGGATTTTTAAACATACTATAAAGTCTGTGTTGGTATAGTACCCT | |
| | TCATAAGGAAAAATGAAGTAATGCCTATAAGTAGCAGGCCTTTGTGCCTCAGTGTCAAGAGAAATCAAGA | |
| | GATGCTAAAAGCTTTACAATGGAAGTGGCCTCATGGATGAATCCGGGGTATGAGCCCAGGAGAACGTGCT | |
| | GCTTTTGGTAACTTATCCCTTTTTCTCTTAAGAAAGCAGGTACTTTCTTATTAGAAATATGTTAGAATGT | |
| | GTAAGCAAACGACAGTGCCTTTAGAATTACAATTCTAACTTACATATTTTTTGAAAGTAAAATAATTCAC | |
| | AAGCTTTGGTATTTTAAAATTATTGTTAAACATATCATAACTAATCATACCAGGGTACTGCAATACCACT | |
| | GTTTATAAGTGACAAAATTAGGCCAAAGGTGATTTTTTTTTAAATCAGGAAGCTGGTTACTGGCTCTACT | |
| | GAGAGTTGGAGCCCTGATGTTCTGATTCTTCAAAGTCACCCTAAAAGAAGATCTGACAGGAAAGCTGTAT | |
| | AATGAGATAGAAAAACGTCAGGTATGGAAGGCTTTCAGTTTTAATATGGCTGAAAGCAAAGGATAACGAA | |
| | TTCAGAATTAGTAATGTAAAATCTTGATACCCTAATCTTGCTTCTGGATCTGTTCTTTTTTTAAAAAAAC | |
| | TTCCTTCACCGCGCCTATAATCCTAGCACTTTGGGAGGCCGAGGCAGGCAGATCACGGGGTCAGGAGATC | |
| | AAGACCATCCTGGCTAACATGGTGAAACCCCGTCTCTACTGAAAATACAAAAAATTAGCCGGGTGTGGTG | |
| | GCGGGCGCCTGTAGTTCCAGCTACTCGGGAGGCTGAGGCAAGAGAATGGCATGAACCCGGTAGGGGAGCT | |
| | TGCAGTGAGCCCAGATCATGCCACTGTACTCCAGCCTAGGTGACAGAGCAAGACTCTGTCTCAAAAACAA | |
| | GCAAACAGACTTCCTTCAACAAATATTTATTAAATATCCACTTTGCAACAGCACTGAAATGGCTGTAAGG | |
| | ACTCCTGAGATATGTGTCCAGCAAGGAGTTTACAGTCAAACAGGAGAGACATGCCTGTAGTTACATCCAG | |
| | TGTGATGGGTGCTGAGAGGCAAGTACAAACCACGATG | |
| TTK | AGCATTGACCAATAGGAGACCGTAGTGATAGCGACGGGGAAATTCAAACGTGTTTGCGGAAAGGAGTTTG | 97 |
| NM_003318.4 | GGTTCCATCTTTTCATTTCCCCAGCGCAGCTTTCTGTAGAAATGGAATCCGAGGATTTAAGTGGCAGAGA | |
| | ATTGACAATTGATTCCATAATGAACAAAGTGAGAGACATTAAAAATAAGTTTAAAAATGAAGACCTTACT | |
| | GATGAACTAAGCTTGAATAAAATTTCTGCTGATACTACAGATAACTCGGGAACTGTTAACCAAATTATGA | |
| | TGATGGCAAACAACCCAGAGGACTGGTTGAGTTTGTTGCTCAAACTAGAGAAAAACAGTGTTCCGCTAAG | |
| | TGATGCTCTTTTAAATAAATTGATTGGTCGTTACAGTCAAGCAATTGAAGCGCTTCCCCCAGATAAATAT | |
| | GGCCAAAATGAGAGTTTTGCTAGAATTCAAGTGAGATTTGCTGAATTAAAAGCTATTCAAGAGCCAGATG | |
| | ATGCACGTGACTACTTTCAAATGGCCAGAGCAAACTGCAAGAAATTTGCTTTTGTTCATATATCTTTTGC | |
| | ACAATTTGAACTGTCACAAGGTAATGTCAAAAAAAGTAAACAACTTCTTCAAAAAGCTGTAGAACGTGGA | |
| | GCAGTACCACTAGAAATGCTGGAAATTGCCCTGCGGAATTTAAACCTCCAAAAAAAGCAGCTGCTTTCAG | |
| | AGGAGGAAAAGAAGAATTTATCAGCATCTACGGTATTAACTGCCCAAGAATCATTTTCCGGTTCACTTGG | |
| | GCATTTACAGAATAGGAACAACAGTTGTGATTCCAGAGGACAGACTACTAAAGCCAGGTTTTTATATGGA | |
| | GAGAACATGCCACCACAAGATGCAGAAATAGGTTACCGGAATTCATTGAGACAAACTAACAAAACTAAAC | |
| | AGTCATGCCCATTTGGAAGAGTCCCAGTTAACCTTCTAAATAGCCCAGATTGTGATGTGAAGACAGATGA | |
| | TTCAGTTGTACCTTGTTTTATGAAAAGACAAACCTCTAGATCAGAATGCCGAGATTTGGTTGTGCCTGGA | |
| | TCTAAACCAAGTGGAAATGATTCCTGTGAATTAAGAAATTTAAAGTCTGTTCAAAATAGTCATTTCAAGG | |
| | AACCTCTGGTGTCAGATGAAAAGAGTTCTGAACTTATTATTACTGATTCAATAACCCTGAAGAATAAAAC | |
| | GGAATCAAGTCTTCTAGCTAAATTAGAAGAAACTAAAGAGTATCAAGAACCAGAGGTTCCAGAGAGTAAC | |
| | CAGAAACAGTGGCAATCTAAGAGAAAGTCAGAGTGTATTAACCAGAATCCTGCTGCATCTTCAAATCACT | |
| | GGCAGATTCCGGAGTTAGCCCGAAAAGTTAATACAGAGCAGAAACATACCACTTTTGAGCAACCTGTCTT | |
| | TTCAGTTTCAAAACAGTCACCACCAATATCAACATCTAAATGGTTTGACCCAAAATCTATTTGTAAGACA | |
| | CCAAGCAGCAATACCTTGGATGATTACATGAGCTGTTTTAGAACTCCAGTTGTAAAGAATGACTTTCCAC | |
| | CTGCTTGTCAGTTGTCAACACCTTATGGCCAACCTGCCTGTTTCCAGCAGCAACAGCATCAAATACTTGC | |
| | CACTCCACTTCAAAATTTACAGGTTTTAGCATCTTCTTCAGCAAATGAATGCATTTCGGTTAAAGGAAGA | |
| | ATTTATTCCATATTAAAGCAGATAGGAAGTGGAGGTTCAAGCAAGGTATTTCAGGTGTTAAATGAAAAGA | |
| | AACAGATATATGCTATAAAATATGTGAACTTAGAAGAAGCAGATAACCAAACTCTTGATAGTTACCGGAA | |
| | CGAAATAGCTTATTTGAATAAACTACAACAACACAGTGATAAGATCATCCGACTTTATGATTATGAAATC | |
| | ACGGACCAGTACATCTACATGGTAATGGAGTGTGGAAATATTGATCTTAATAGTTGGCTTAAAAAGAAAA | |
| | AATCCATTGATCCATGGGAACGCAAGAGTTACTGGAAAAATATGTTAGAGGCAGTTCACACAATCCATCA | |
| | ACATGGCATTGTTCACAGTGATCTTAAACCAGCTAACTTTCTGATAGTTGATGGAATGCTAAAGCTAATT | |
| | GATTTTGGGATTGCAAACCAAATGCAACCAGATACAACAAGTGTTGTTAAAGATTCTCAGGTTGGCACAG | |
| | TTAATTATATGCCACCAGAAGCAATCAAAGATATGTCTTCCTCCAGAGAGAATGGGAAATCTAAGTCAAA | |
| | GATAAGCCCCAAAAGTGATGTTTGGTCCTTAGGATGTATTTTGTACTATATGACTTACGGGAAAACACCA | |
| | TTTCAGCAGATAATTAATCAGATTTCTAAATTACATGCCATAATTGATCCTAATCATGAAATTGAATTTC | |
| | CCGATATTCCAGAGAAAGATCTTCAAGATGTGTTAAAGTGTTGTTTAAAAAGGGACCCAAAACAGAGGAT | |
| | ATCCATTCCTGAGCTCCTGGCTCATCCATATGTTCAAATTCAAACTCATCCAGTTAACCAAATGGCCAAG | |
| | GGAACCACTGAAGAAATGAAATATGTTCTGGGCCAACTTGTTGGTCTGAATTCTCCTAACTCCATTTTGA | |
| | AAGCTGCTAAAACTTTATATGAACACTATAGTGGTGGTGAAAGTCATAATTCTTCATCCTCCAAGACTTT | |
| | TGAAAAAAAAAGGGGAAAAAAATGATTTGCAGTTATTCGTAATGTCAGATACCACCTATAAAATATATTG | |
| | GACTGTTATACTCTTGAATCCCTGTGGAAATCTACATTTGAAGACAACATCACTCTGAAGTGTTATCAGC | |
| | AAAAAAAATTCAGTAGATTATCTTTAAAAGAAAACTGTAAAAATAGCAACCACTTATGGCACTGTATATA | |
| | TTGTAGACTTGTTTTCTCTGTTTTATGCTCTTGTGTAATCTACTTGACATCATTTTACTCTTGGAATAGT | |
| | GGGTGGATAGCAAGTATATTCTAAAAAACTTTGTAAATAAAGTTTTGTGGCTAAAATGACACTAACATTT | |
| AR | CGAGATCCCGGGGAGCCAGCTTGCTGGGAGAGCGGGACGGTCCGGAGCAAGCCCAGAGGCAGAGGAGGCG | 98 |
| NM_000044.3 | ACAGAGGGAAAAAGGGCCGAGCTAGCCGCTCCAGTGCTGTACAGGAGCCGAAGGGACGCACCACGCCAGC | |
| | CCCAGCCCGGCTCCAGCGACAGCCAACGCCTCTTGCAGCGCGGCGGCTTCGAAGCCGCCGCCCGGAGCTG | |
| | CCCTTTCCTCTTCGGTGAAGTTTTTAAAAGCTGCTAAAGACTCGGAGGAAGCAAGGAAAGTGCCTGGTAG | |
| | GACTGACGGCTGCCTTTGTCCTCCTCCTCTCCACCCCGCCTCCCCCCACCCTGCCTTCCCCCCCTCCCCC | |
| | GTCTTCTCTCCCGCAGCTGCCTCAGTCGGCTACTCTCAGCCAACCCCCCTCACCACCCTTCTCCCCACCC | |
| | GCCCCCCCGCCCCCGTCGGCCCAGCGCTGCCAGCCCGAGTTTGCAGAGAGGTAACTCCCTTTGGCTGCGA | |
| | GCGGGCGAGCTAGCTGCACATTGCAAAGAAGGCTCTTAGGAGCCAGGCGACTGGGGAGCGGCTTCAGCAC | |
| | TGCAGCCACGACCCGCCTGGTTAGGCTGCACGCGGAGAGAACCCTCTGTTTTCCCCCACTCTCTCTCCAC | |
| | CTCCTCCTGCCTTCCCCACCCCGAGTGCGGAGCCAGAGATCAAAAGATGAAAAGGCAGTCAGGTCTTCAG | |
| | TAGCCAAAAAACAAAACAAACAAAAACAAAAAAGCCGAAATAAAAGAAAAAGATAATAACTCAGTTCTTA | |
| | TTTGCACCTACTTCAGTGGACACTGAATTTGGAAGGTGGAGGATTTTGTTTTTTTCTTTTAAGATCTGGG | |
| | CATCTTTTGAATCTACCCTTCAAGTATTAAGAGACAGACTGTGAGCCTAGCAGGGCAGATCTTGTCCACC | |
| | GTGTGTCTTCTTCTGCACGAGACTTTGAGGCTGTCAGAGCGCTTTTTGCGTGGTTGCTCCCGCAAGTTTC | |
| | CTTCTCTGGAGCTTCCCGCAGGTGGGCAGCTAGCTGCAGCGACTACCGCATCATCACAGCCTGTTGAACT | |
| | CTTCTGAGCAAGAGAAGGGGAGGCGGGGTAAGGGAAGTAGGTGGAAGATTCAGCCAAGCTCAAGGATGGA | |
| | AGTGCAGTTAGGGCTGGGAAGGGTCTACCCTCGGCCGCCGTCCAAGACCTACCGAGGAGCTTTCCAGAAT | |
| | CTGTTCCAGAGCGTGCGCGAAGTGATCCAGAACCCGGGCCCCAGGCACCCAGAGGCCGCGAGCGCAGCAC | |
| | CTCCCGGCGCCAGTTTGCTGCTGCTGCAGCAGCAGCAGCAGCAGCAGCAGCAGCAGCAGCAGCAGCAGCA | |
| | GCAGCAGCAGCAGCAGCAGCAGCAAGAGACTAGCCCCAGGCAGCAGCAGCAGCAGCAGGGTGAGGATGGT | |
| | TCTCCCCAAGCCCATCGTAGAGGCCCCACAGGCTACCTGGTCCTGGATGAGGAACAGCAACCTTCACAGC | |
| | CGCAGTCGGCCCTGGAGTGCCACCCCGAGAGAGGTTGCGTCCCAGAGCCTGGAGCCGCCGTGGCCGCCAG | |
| | CAAGGGGCTGCCGCAGCAGCTGCCAGCACCTCCGGACGAGGATGACTCAGCTGCCCCATCCACGTTGTCC | |
| | CTGCTGGGCCCCACTTTCCCCGGCTTAAGCAGCTGCTCCGCTGACCTTAAAGACATCCTGAGCGAGGCCA | |
| | GCACCATGCAACTCCTTCAGCAACAGCAGCAGGAAGCAGTATCCGAAGGCAGCAGCAGCGGGAGAGCGAG | |
| | GGAGGCCTCGGGGGCTCCCACTTCCTCCAAGGACAATTACTTAGGGGGCACTTCGACCATTTCTGACAAC | |
| | GCCAAGGAGTTGTGTAAGGCAGTGTCGGTGTCCATGGGCCTGGGTGTGGAGGCGTTGGAGCATCTGAGTC | |
| | CAGGGGAACAGCTTCGGGGGGATTGCATGTACGCCCCACTTTTGGGAGTTCCACCCGCTGTGCGTCCCAC | |
| | TCCTTGTGCCCCATTGGCCGAATGCAAAGGTTCTCTGCTAGACGACAGCGCAGGCAAGAGCACTGAAGAT | |
| | ACTGCTGAGTATTCCCCTTTCAAGGGAGGTTACACCAAAGGGCTAGAAGGCGAGAGCCTAGGCTGCTCTG | |
| | GCAGCGCTGCAGCAGGGAGCTCCGGGACACTTGAACTGCCGTCTACCCTGTCTCTCTACAAGTCCGGAGC | |
| | ACTGGACGAGGCAGCTGCGTACCAGAGTCGCGACTACTACAACTTTCCACTGGCTCTGGCCGGACCGCCG | |
| | CCCCCTCCGCCGCCTCCCCATCCCCACGCTCGCATCAAGCTGGAGAACCCGCTGGACTACGGCAGCGCCT | |
| | GGGCGGCTGCGGCGGCGCAGTGCCGCTATGGGGACCTGGCGAGCCTGCATGGCGCGGGTGCAGCGGGACC | |
| | CGGTTCTGGGTCACCCTCAGCCGCCGCTTCCTCATCCTGGCACACTCTCTTCACAGCCGAAGAAGGCCAG | |
| | TTGTATGGACCGTGTGGTGGTGGTGGGGGTGGTGGCGGCGGCGGCGGCGGCGGCGGCGGCGGCGGCGGCG | |
| | GCGGCGGCGGCGGCGAGGCGGGAGCTGTAGCCCCCTACGGCTACACTCGGCCCCCTCAGGGGCTGGCGGG | |
| | CCAGGAAAGCGACTTCACCGCACCTGATGTGTGGTACCCTGGCGGCATGGTGAGCAGAGTGCCCTATCCC | |
| | AGTCCCACTTGTGTCAAAAGCGAAATGGGCCCCTGGATGGATAGCTACTCCGGACCTTACGGGGACATGC | |
| | GTTTGGAGACTGCCAGGGACCATGTTTTGCCCATTGACTATTACTTTCCACCCCAGAAGACCTGCCTGAT | |
| | CTGTGGAGATGAAGCTTCTGGGTGTCACTATGGAGCTCTCACATGTGGAAGCTGCAAGGTCTTCTTCAAA | |
| | AGAGCCGCTGAAGGGAAACAGAAGTACCTGTGCGCCAGCAGAAATGATTGCACTATTGATAAATTCCGAA | |
| | GGAAAAATTGTCCATCTTGTCGTCTTCGGAAATGTTATGAAGCAGGGATGACTCTGGGAGCCCGGAAGCT | |
| | GAAGAAACTTGGTAATCTGAAACTACAGGAGGAAGGAGAGGCTTCCAGCACCACCAGCCCCACTGAGGAG | |
| | ACAACCCAGAAGCTGACAGTGTCACACATTGAAGGCTATGAATGTCAGCCCATCTTTCTGAATGTCCTGG | |
| | AAGCCATTGAGCCAGGTGTAGTGTGTGCTGGACACGACAACAACCAGCCCGACTCCTTTGCAGCCTTGCT | |
| | CTCTAGCCTCAATGAACTGGGAGAGAGACAGCTTGTACACGTGGTCAAGTGGGCCAAGGCCTTGCCTGGC | |
| | TTCCGCAACTTACACGTGGACGACCAGATGGCTGTCATTCAGTACTCCTGGATGGGGCTCATGGTGTTTG | |
| | CCATGGGCTGGCGATCCTTCACCAATGTCAACTCCAGGATGCTCTACTTCGCCCCTGATCTGGTTTTCAA | |
| | TGAGTACCGCATGCACAAGTCCCGGATGTACAGCCAGTGTGTCCGAATGAGGCACCTCTCTCAAGAGTTT | |
| | GGATGGCTCCAAATCACCCCCCAGGAATTCCTGTGCATGAAAGCACTGCTACTCTTCAGCATTATTCCAG | |
| | TGGATGGGCTGAAAAATCAAAAATTCTTTGATGAACTTCGAATGAACTACATCAAGGAACTCGATCGTAT | |
| | CATTGCATGCAAAAGAAAAAATCCCACATCCTGCTCAAGACGCTTCTACCAGCTCACCAAGCTCCTGGAC | |
| | TCCGTGCAGCCTATTGCGAGAGAGCTGCATCAGTTCACTTTTGACCTGCTAATCAAGTCACACATGGTGA | |
| | GCGTGGACTTTCCGGAAATGATGGCAGAGATCATCTCTGTGCAAGTGCCCAAGATCCTTTCTGGGAAAGT | |
| | CAAGCCCATCTATTTCCACACCCAGTGAAGCATTGGAAACCCTATTTCCCCACCCCAGCTCATGCCCCCT | |
| | TTCAGATGTCTTCTGCCTGTTATAACTCTGCACTACTCCTCTGCAGTGCCTTGGGGAATTTCCTCTATTG | |
| | ATGTACAGTCTGTCATGAACATGTTCCTGAATTCTATTTGCTGGGCTTTTTTTTTCTCTTTCTCTCCTTT | |
| | CTTTTTCTTCTTCCCTCCCTATCTAACCCTCCCATGGCACCTTCAGACTTTGCTTCCCATTGTGGCTCCT | |
| | ATCTGTGTTTTGAATGGTGTTGTATGCCTTTAAATCTGTGATGATCCTCATATGGCCCAGTGTCAAGTTG | |
| | TGCTTGTTTACAGCACTACTCTGTGCCAGCCACACAAACGTTTACTTATCTTATGCCACGGGAAGTTTAG | |
| | AGAGCTAAGATTATCTGGGGAAATCAAAACAAAAACAAGCAAACAAAAAAAAAAAGCAAAAACAAAACAA | |
| | AAAATAAGCCAAAAAACCTTGCTAGTGTTTTTTCCTCAAAAATAAATAAATAAATAAATAAATACGTACA | |
| | TACATACACACATACATACAAACATATAGAAATCCCCAAAGAGGCCAATAGTGACGAGAAGGTGAAAATT | |
| | GCAGGCCCATGGGGAGTTACTGATTTTTTCATCTCCTCCCTCCACGGGAGACTTTATTTTCTGCCAATGG | |
| | CTATTGCCATTAGAGGGCAGAGTGACCCCAGAGCTGAGTTGGGCAGGGGGGTGGACAGAGAGGAGAGGAC | |
| | AAGGAGGGCAATGGAGCATCAGTACCTGCCCACAGCCTTGGTCCCTGGGGGCTAGACTGCTCAACTGTGG | |
| | AGCAATTCATTATACTGAAAATGTGCTTGTTGTTGAAAATTTGTCTGCATGTTAATGCCTCACCCCCAAA | |
| | CCCTTTTCTCTCTCACTCTCTGCCTCCAACTTCAGATTGACTTTCAATAGTTTTTCTAAGACCTTTGAAC | |
| | TGAATGTTCTCTTCAGCCAAAACTTGGCGACTTCCACAGAAAAGTCTGACCACTGAGAAGAAGGAGAGCA | |
| | GAGATTTAACCCTTTGTAAGGCCCCATTTGGATCCAGGTCTGCTTTCTCATGTGTGAGTCAGGGAGGAGC | |
| | TGGAGCCAGAGGAGAAGAAAATGATAGCTTGGCTGTTCTCCTGCTTAGGACACTGACTGAATAGTTAAAC | |
| | TCTCACTGCCACTACCTTTTCCCCACCTTTAAAAGACCTGAATGAAGTTTTCTGCCAAACTCCGTGAAGC | |
| | CACAAGCACCTTATGTCCTCCCTTCAGTGTTTTGTGGGCCTGAATTTCATCACACTGCATTTCAGCCATG | |
| | GTCATCAAGCCTGTTTGCTTCTTTTGGGCATGTTCACAGATTCTCTGTTAAGAGCCCCCACCACCAAGAA | |
| | GGTTAGCAGGCCAACAGCTCTGACATCTATCTGTAGATGCCAGTAGTCACAAAGATTTCTTACCAACTCT | |
| | CAGATCGCTGGAGCCCTTAGACAAACTGGAAAGAAGGCATCAAAGGGATCAGGCAAGCTGGGCGTCTTGC | |
| | CCTTGTCCCCCAGAGATGATACCCTCCCAGCAAGTGGAGAAGTTCTCACTTCCTTCTTTAGAGCAGCTAA | |
| | AGGGGCTACCCAGATCAGGGTTGAAGAGAAAACTCAATTACCAGGGTGGGAAGAATGAAGGCACTAGAAC | |
| | CAGAAACCCTGCAAATGCTCTTCTTGTCACCCAGCATATCCACCTGCAGAAGTCATGAGAAGAGAGAAGG | |
| | AACAAAGAGGAGACTCTGACTACTGAATTAAAATCTTCAGCGGCAAAGCCTAAAGCCAGATGGACACCAT | |
| | CTGGTGAGTTTACTCATCATCCTCCTCTGCTGCTGATTCTGGGCTCTGACATTGCCCATACTCACTCAGA | |
| | TTCCCCACCTTTGTTGCTGCCTCTTAGTCAGAGGGAGGCCAAACCATTGAGACTTTCTACAGAACCATGG | |
| | CTTCTTTCGGAAAGGTCTGGTTGGTGTGGCTCCAATACTTTGCCACCCATGAACTCAGGGTGTGCCCTGG | |
| | GACACTGGTTTTATATAGTCTTTTGGCACACCTGTGTTCTGTTGACTTCGTTCTTCAAGCCCAAGTGCAA | |
| | GGGAAAATGTCCACCTACTTTCTCATCTTGGCCTCTGCCTCCTTACTTAGCTCTTAATCTCATCTGTTGA | |
| | ACTCAAGAAATCAAGGGCCAGTCATCAAGCTGCCCATTTTAATTGATTCACTCTGTTTGTTGAGAGGATA | |
| | GTTTCTGAGTGACATGATATGATCCACAAGGGTTTCCTTCCCTGATTTCTGCATTGATATTAATAGCCAA | |
| | ACGAACTTCAAAACAGCTTTAAATAACAAGGGAGAGGGGAACCTAAGATGAGTAATATGCCAATCCAAGA | |
| | CTGCTGGAGAAAACTAAAGCTGACAGGTTCCCTTTTTGGGGTGGGATAGACATGTTCTGGTTTTCTTTAT | |
| | TATTACACAATCTGGCTCATGTACAGGATCACTTTTAGCTGTTTTAAACAGAAAAAAATATCCACCACTC | |
| | TTTTCAGTTACACTAGGTTACATTTTAATAGGTCCTTTACATCTGTTTTGGAATGATTTTCATCTTTTGT | |
| | GATACACAGATTGAATTATATCATTTTCATATCTCTCCTTGTAAATACTAGAAGCTCTCCTTTACATTTC | |
| | TCTATCAAATTTTTCATCTTTATGGGTTTCCCAATTGTGACTCTTGTCTTCATGAATATATGTTTTTCAT | |
| | TTGCAAAAGCCAAAAATCAGTGAAACAGCAGTGTAATTAAAAGCAACAACTGGATTACTCCAAATTTCCA | |
| | AATGACAAAACTAGGGAAAAATAGCCTACACAAGCCTTTAGGCCTACTCTTTCTGTGCTTGGGTTTGAGT | |
| | GAACAAAGGAGATTTTAGCTTGGCTCTGTTCTCCCATGGATGAAAGGAGGAGGATTTTTTTTTTCTTTTG | |
| | GCCATTGATGTTCTAGCCAATGTAATTGACAGAAGTCTCATTTTGCATGCGCTCTGCTCTACAAACAGAG | |
| | TTGGTATGGTTGGTATACTGTACTCACCTGTGAGGGACTGGCCACTCAGACCCACTTAGCTGGTGAGCTA | |
| | GAAGATGAGGATCACTCACTGGAAAAGTCACAAGGACCATCTCCAAACAAGTTGGCAGTGCTCGATGTGG | |
| | ACGAAGAGTGAGGAAGAGAAAAAGAAGGAGCACCAGGGAGAAGGCTCCGTCTGTGCTGGGCAGCAGACAG | |
| | CTGCCAGGATCACGAACTCTGTAGTCAAAGAAAAGAGTCGTGTGGCAGTTTCAGCTCTCGTTCATTGGGC | |
| | AGCTCGCCTAGGCCCAGCCTCTGAGCTGACATGGGAGTTGTTGGATTCTTTGTTTCATAGCTTTTTCTAT | |
| | GCCATAGGCAATATTGTTGTTCTTGGAAAGTTTATTATTTTTTTAACTCCCTTACTCTGAGAAAGGGATA | |
| | TTTTGAAGGACTGTCATATATCTTTGAAAAAAGAAAATCTGTAATACATATATTTTTATGTATGTTCACT | |
| | GGCACTAAAAAATATAGAGAGCTTCATTCTGTCCTTTGGGTAGTTGCTGAGGTAATTGTCCAGGTTGAAA | |
| | AATAATGTGCTGATGCTAGAGTCCCTCTCTGTCCATACTCTACTTCTAAATACATATAGGCATACATAGC | |
| | AAGTTTTATTTGACTTGTACTTTAAGAGAAAATATGTCCACCATCCACATGATGCACAAATGAGCTAACA | |
| | TTGAGCTTCAAGTAGCTTCTAAGTGTTTGTTTCATTAGGCACAGCACAGATGTGGCCTTTCCCCCCTTCT | |
| | CTCCCTTGATATCTGGCAGGGCATAAAGGCCCAGGCCACTTCCTCTGCCCCTTCCCAGCCCTGCACCAAA | |
| | GCTGCATTTCAGGAGACTCTCTCCAGACAGCCCAGTAACTACCCGAGCATGGCCCCTGCATAGCCCTGGA | |
| | AAAATAAGAGGCTGACTGTCTACGAATTATCTTGTGCCAGTTGCCCAGGTGAGAGGGCACTGGGCCAAGG | |
| | GAGTGGTTTTCATGTTTGACCCACTACAAGGGGTCATGGGAATCAGGAATGCCAAAGCACCAGATCAAAT | |
| | CCAAAACTTAAAGTCAAAATAAGCCATTCAGCATGTTCAGTTTCTTGGAAAAGGAAGTTTCTACCCCTGA | |
| | TGCCTTTGTAGGCAGATCTGTTCTCACCATTAATCTTTTTGAAAATCTTTTAAAGCAGTTTTTAAAAAGA | |
| | GAGATGAAAGCATCACATTATATAACCAAAGATTACATTGTACCTGCTAAGATACCAAAATTCATAAGGG | |
| | CAGGGGGGGAGCAAGCATTAGTGCCTCTTTGATAAGCTGTCCAAAGACAGACTAAAGGACTCTGCTGGTG | |
| | ACTGACTTATAAGAGCTTTGTGGGTTTTTTTTTCCCTAATAATATACATGTTTAGAAGAATTGAAAATAA | |
| | TTTCGGGAAAATGGGATTATGGGTCCTTCACTAAGTGATTTTATAAGCAGAACTGGCTTTCCTTTTCTCT | |
| | AGTAGTTGCTGAGCAAATTGTTGAAGCTCCATCATTGCATGGTTGGAAATGGAGCTGTTCTTAGCCACTG | |
| | TGTTTGCTAGTGCCCATGTTAGCTTATCTGAAGATGTGAAACCCTTGCTGATAAGGGAGCATTTAAAGTA | |
| | CTAGATTTTGCACTAGAGGGACAGCAGGCAGAAATCCTTATTTCTGCCCACTTTGGATGGCACAAAAAGT | |
| | TATCTGCAGTTGAAGGCAGAAAGTTGAAATACATTGTAAATGAATATTTGTATCCATGTTTCAAAATTGA | |
| | AATATATATATATATATATATATATATATATATATATATATAGTGTGTGTGTGTGTTCTGATAGCTTTAA | |
| | CTTTCTCTGCATCTTTATATTTGGTTCCAGATCACACCTGATGCCATGTACTTGTGAGAGAGGATGCAGT | |
| | TTTGTTTTGGAAGCTCTCTCAGAACAAACAAGACACCTGGATTGATCAGTTAACTAAAAGTTTTCTCCCC | |
| | TATTGGGTTTGACCCACAGGTCCTGTGAAGGAGCAGAGGGATAAAAAGAGTAGAGGACATGATACATTGT | |
| | ACTTTACTAGTTCAAGACAGATGAATGTGGAAAGCATAAAAACTCAATGGAACTGACTGAGATTTACCAC | |
| | AGGGAAGGCCCAAACTTGGGGCCAAAAGCCTACCCAAGTGATTGACCAGTGGCCCCCTAATGGGACCTGA | |
| | GCTGTTGGAAGAAGAGAACTGTTCCTTGGTCTTCACCATCCTTGTGAGAGAAGGGCAGTTTCCTGCATTG | |
| | GAACCTGGAGCAAGCGCTCTATCTTTCACACAAATTCCCTCACCTGAGATTGAGGTGCTCTTGTTACTGG | |
| | GTGTCTGTGTGCTGTAATTCTGGTTTTGGATATGTTCTGTAAAGATTTTGACAAATGAAAATGTGTTTTT | |
| | CTCTGTTAAAACTTGTCAGAGTACTAGAAGTTGTATCTCTGTAGGTGCAGGTCCATTTCTGCCCACAGGT | |
| | AGGGTGTTTTTCTTTGATTAAGAGATTGACACTTCTGTTGCCTAGGACCTCCCAACTCAACCATTTCTAG | |
| | GTGAAGGCAGAAAAATCCACATTAGTTACTCCTCTTCAGACATTTCAGCTGAGATAACAAATCTTTTGGA | |
| | ATTTTTTCACCCATAGAAAGAGTGGTAGATATTTGAATTTAGCAGGTGGAGTTTCATAGTAAAAACAGCT | |
| | TTTGACTCAGCTTTGATTTATCCTCATTTGATTTGGCCAGAAAGTAGGTAATATGCATTGATTGGCTTCT | |
| | GATTCCAATTCAGTATAGCAAGGTGCTAGGTTTTTTCCTTTCCCCACCTGTCTCTTAGCCTGGGGAATTA | |
| | AATGAGAAGCCTTAGAATGGGTGGCCCTTGTGACCTGAAACACTTCCCACATAAGCTACTTAACAAGATT | |
| | GTCATGGAGCTGCAGATTCCATTGCCCACCAAAGACTAGAACACACACATATCCATACACCAAAGGAAAG | |
| | ACAATTCTGAAATGCTGTTTCTCTGGTGGTTCCCTCTCTGGCTGCTGCCTCACAGTATGGGAACCTGTAC | |
| | TCTGCAGAGGTGACAGGCCAGATTTGCATTATCTCACAACCTTAGCCCTTGGTGCTAACTGTCCTACAGT | |
| | GAAGTGCCTGGGGGGTTGTCCTATCCCATAAGCCACTTGGATGCTGACAGCAGCCACCATCAGAATGACC | |
| | CACGCAAAAAAAAGAAAAAAAAAATTAAAAAGTCCCCTCACAACCCAGTGACACCTTTCTGCTTTCCTCT | |
| | AGACTGGAACATTGATTAGGGAGTGCCTCAGACATGACATTCTTGTGCTGTCCTTGGAATTAATCTGGCA | |
| | GCAGGAGGGAGCAGACTATGTAAACAGAGATAAAAATTAATTTTCAATATTGAAGGAAAAAAGAAATAAG | |
| | AAGAGAGAGAGAAAGAAAGCATCACACAAAGATTTTCTTAAAAGAAACAATTTTGCTTGAAATCTCTTTA | |
| | GATGGGGCTCATTTCTCACGGTGGCACTTGGCCTCCACTGGGCAGCAGGACCAGCTCCAAGCGCTAGTGT | |
| | TCTGTTCTCTTTTTGTAATCTTGGAATCTTTTGTTGCTCTAAATACAATTAAAAATGGCAGAAACTTGTT | |
| | TGTTGGACTACATGTGTGACTTTGGGTCTGTCTCTGCCTCTGCTTTCAGAAATGTCATCCATTGTGTAAA | |
| | ATATTGGCTTACTGGTCTGCCAGCTAAAACTTGGCCACATCCCCTGTTATGGCTGCAGGATCGAGTTATT | |
| | GTTAACAAAGAGACCCAAGAAAAGCTGCTAATGTCCTCTTATCATTGTTGTTAATTTGTTAAAACATAAA | |
| | GAAATCTAAAATTTCAAAAAA | |
| CTSL2 | GGTAGGCGCGCCCAGACCTGAGACGGGTTGGGACTGGGCTGCGTCACGCGCGGGCTCTAAGCGCCCGGGG | 99 |
| NM_001333.3 | CCCCGCCCAGTGGCCGGCACAGCCAATCGCAGCGCGGGAAGGCGGTGGGGGCGGGGAAGGCCGCCTGGAA | |
| | ACTTAAATCCCGAGGCGGGCGAACCTGCACCAGACCGCGGACGTCTGTAATCTCAGAGGCTTGTTTGCTG | |
| | AGGGTGCCTGCGCAGCTGCGACGGCTGCTGGTTTTGAAACATGAATCTTTCGCTCGTCCTGGCTGCCTTT | |
| | TGCTTGGGAATAGCCTCCGCTGTTCCAAAATTTGACCAAAATTTGGATACAAAGTGGTACCAGTGGAAGG | |
| | CAACACACAGAAGATTATATGGCGCGAATGAAGAAGGATGGAGGAGAGCAGTGTGGGAAAAGAATATGAA | |
| | AATGATTGAACTGCACAATGGGGAATACAGCCAAGGGAAACATGGCTTCACAATGGCCATGAATGCTTTT | |
| | GGTGACATGACCAATGAAGAATTCAGGCAGATGATGGGTTGCTTTCGAAACCAGAAATTCAGGAAGGGGA | |
| | AAGTGTTCCGTGAGCCTCTGTTTCTTGATCTTCCCAAATCTGTGGATTGGAGAAAGAAAGGCTACGTGAC | |
| | GCCAGTGAAGAATCAGAAACAGTGTGGTTCTTGTTGGGCTTTTAGTGCGACTGGTGCTCTTGAAGGACAG | |
| | ATGTTCCGGAAAACTGGGAAACTTGTCTCACTGAGCGAGCAGAATCTGGTGGACTGTTCGCGTCCTCAAG | |
| | GCAATCAGGGCTGCAATGGTGGCTTCATGGCTAGGGCCTTCCAGTATGTCAAGGAGAACGGAGGCCTGGA | |
| | CTCTGAGGAATCCTATCCATATGTAGCAGTGGATGAAATCTGTAAGTACAGACCTGAGAATTCTGTTGCT | |
| | AATGACACTGGCTTCACAGTGGTCGCACCTGGAAAGGAGAAGGCCCTGATGAAAGCAGTCGCAACTGTGG | |
| | GGCCCATCTCCGTTGCTATGGATGCAGGCCATTCGTCCTTCCAGTTCTACAAATCAGGCATTTATTTTGA | |
| | ACCAGACTGCAGCAGCAAAAACCTGGATCATGGTGTTCTGGTGGTTGGCTACGGCTTTGAAGGAGCAAAT | |
| | TCGAATAACAGCAAGTATTGGCTCGTCAAAAACAGCTGGGGTCCAGAATGGGGCTCGAATGGCTATGTAA | |
| | AAATAGCCAAAGACAAGAACAACCACTGTGGAATCGCCACAGCAGCCAGCTACCCCAATGTGTGAGCTGA | |
| | TGGATGGTGAGGAGGAAGGACTTAAGGACAGCATGTCTGGGGAAATTTTATCTTGAAACTGACCAAACGC | |
| | TTATTGTGTAAGATAAACCAGTTGAATCATTGAGGATCCAAGTTGAGATTTTAATTCTGTGACATTTTTA | |
| | CAAGGGTAAAATGTTACCACTACTTTAATTATTGTTATACACAGCTTTATGATATCAAAGACTCATTGCT | |
| | TAATTCTAAGACTTTTGAATTTTCATTTTTTAAAAAGATGTACAAAACAGTTTGAAATAAATTTTAATTC | |
| | GTATATAAAGGTGGGCCTTTTTTTAATGCATTGGCTTTTTGTGTAGTCAGGAAATATAATTAAGCTCTGA | |
| | AATAATAACTTCATGTGCCAATGGTATGTTAGGAGAAAGATGCTAGCAGAAAGCTGGCTTCCTGGCTCTT | |
| | GAGTAGTTATAAAAATACAGACTTTATATCAGCTGCCCAGTTACTGTGTGTTACCCAACTCCTGAATCTA | |
| | CCAAAATTTGATAAACAATTTGGAAGGACAAACCTACATTTTTTTTTTTTATGAGACGGAGTCTCTCTCA | |
| | CTCTGTCACCAAGGCTGGAGTGCAGTAGTGTGATCTCAGCTCACTGCAACCTCTGCCTCCCGGGTTTAAG | |
| | CAATTCTCTGCCTCAGCCTCCCGAGTAGCTGGGATTACAGGCGCGTGCCACCACGCCTAGTGTATTTTTA | |
| | GTAGAGAGAGGGTTTCACCATCTTGGCCAGGCTGGTCTTGAACTCTCGACCTCGTGATCCACCTGCCTCA | |
| | GCCTCCCAAAGTGTTGGGATTACAGATGTGAGCCACTGCGCCCAGCCCCTAAATTGTTTTAGTAAAGAAG | |
| | AAAGCAGTTGACTTTTTAGAAAAGGAAATGTCTTCTTCCTTTGACACATAACCTCAAGATGGTTAGGTTA | |
| | CGTGATAAAAAGTGAAGCTGCTTGTTACTGGAGCCTCTCTGAATTGCTGGTGACCACTTTGCAGTCTGAG | |
| | GAAGACGCAGGTGCAAGTAAGTTACCAAGGGTATTTTGTTTTCATTCCAAGTCTCTGATGACATATTCCA | |
| | CCTAGCTCTTCTAGAAAAGCTTATTTGTTAACTAGTGTTAGCAAAAATAAATGGTGTGGTTAACAAATCT | |
| | CAGGCATTTGACAGTAGCTGGAGAAATTTGTTCAAGGTCCACAAGAGATGAGGCTGGGCTACAAAAAGAG | |
| | GCCTCTGGCCGAAGATGGATAAGAGATCACAAGTGAAAGGTCAGAAGTCACTAGGCCAGACTCTGGCTAC | |
| | CTAATCCCTGAATTAAAAATAAACTCAAAATGGGGGGAAAAAGGCTAAGCATATAGTTACACAGGTAGTA | |
| | AATACAAATAAAACGATATTTTTGCATATTTAAAATACTGGAAGAAAGTACACCAAACTTGTGGGTGAAT | |
| | TATGGGTGGTTATTTAACTCGTTTAGTGAAAAGCATGTATTTTTATGAGCAGGAGAAAATAGTAAAGATA | |
| | TACCCACATTCTGCAGGCTAAAGGAGAGCCCTGTGTGTGTTTTAAAAGCCCATGTTTCCAGTCAAATAAA | |
| | AAATTACCGGGGATGAGCTGGTGAAATTTAATCGAAAGGTGATCCATTGTGAATGCAATGGGAGGGAAGG | |
| | GGCATGTGGGACTGTGTATCCCAAAAACCCTTTGATAGCCTATGTCCACAGCCATCTCTGGAAAATCCAG | |
| | TCTACCATATTCAGTCTTGAGTTTTCTCTGAGAAAGGATTCCTTCGTCTTTGCAGCAGCAGGCTAAGTTG | |
| | GTACTCTCCACAGATTCTTGGAACAACAACCCAGGCTCTAAGGAAACATCTAGGCACTAAATTGAATGAA | |
| | AGAGTGATGGCTTTTTATTCAAATAAAAAAATTTCAAATCTGTCAAAACAGCACCCCTCGGAAAACTAAA | |
| | ATAGAGATATTTCAAGATTTTATAATTTTCAAAGACCTTTGAAATATTTTAAACTTGTGAAAAGTTACAA | |
| | ACCTGATGTGTTGTCTAAAAGCGTTTTTCAAACAAGCCAGTAGACTTGAAAAATCTAGTCTGAAGCACAG | |
| | ACTTAACCAATATTTGCTGGGGATATGCCCCCAAATCTGGCCATAAACAAAATCTCTGCAGTACTGTGAC | |
| | AGGTTCATGATGGCCATGACGCCATGCTGAAGGTTTACCGGAATGAGAGCAAGGAACACCTGGACCACCC | |
| | AGGGCGGGAAAACGGCTTAAAGGCGTTCCTAAACTACAAACAATAGCATGAGCGATCTGTGCCTTAAGGA | |
| | CATGTTCCTGCTGCAGATAACTAGCCAGACCCCATGCCTTTGTTTCGTTTGGGAAGGAATACTTTTAGTT | |
| | AATCTATAATCTATAGAAACAATGTTTATCACTGGCTTGCTGTCAATAAACATGGGTAAATCTCTGTTCG | |
| | GGGCTCTCAGCTCTGAAAGCTGTGAGTCCCCTGATTTCCCACTCTGCATGCTATATTTCTGGGTGTGTGT | |
| | CTTTAATTTCTCTAGCGCCTCTGGGTTAGGGTCTCCATGACCAAGCTGGTCTCGGCAAATATTTCCTATA | |
| | CTCGAACATCTAAATTGTTTGTTTTCTTACTTGAATTGCAAAGGAAGTAAGGAAGGGTGAGATAGAAATC | |
| | ACTGAGCATATTAAGAGGGAGGAGTTTGCTGATGTGGGAGTGTAGTTATGACACTTGGGCATCATACTAG | |
| | AGGCTATGGACTTAGCAATAAGGAAACATCCACTCAGCCCTATGTGTGGTTCATGTGTATGTTTTGCCTA | |
| | TGAAAGTTGAAACTGTTTTCTAAATGTTATTTCCTTTTGTAACTGATAAAATTTCTAAAAAGCAAAGAAG | |
| | AAACTTTTCTGTATTAAAAATAACAAACATTAGTAAATGTATATATACAGTCATGTGTTGCTTAATGATG | |
| | GGGATACATTCTGAGAAATGTGTCTTGGGTGATTTCATCGTGACGTGAACATCATAGAGTACACTGACAC | |
| | AAACCTAGATGGTATAGCCTATTACACACCTAGGCTATATGGTACAGCCTGTTGCTCCTAAGCTACGCAC | |
| | CTGTGCAACACATCACTGTGCTGAGTACTGTACACAGTTGTAACACAGTGGTAAGTATTCGTGTATCTGA | |
| | ACAGAAAAGTACAGTAAAAATATAGGATCATAATTTTATGGGACCACTATCATATATGCAGTCACTGACC | |
| | AAAACATCACACAGCACATGACTTGTGTGTATGGATATCTCAATTGTAAACAATTTCACAAATGTTCATT | |
| | ATCTCTTTTTAAGTAAGTTAATAAGTAAAACTATTACTAAGCTGCAAAAAAAAAAAAAAAAA | |
| CENPA | CCGTGAAGTGGGCGGAGCGAGCGATTTGAACGCGAGCGGCGCGGACTTCTGCCAAGCACCGGCTCATGTG | 100 |
| NM_001809.3 | AGGCTCGCGGCACAGCGTTCTCTGGGCTCCCCAGAAGCCAGCCTTTCGCTCCCGGACCCGGCAGCCCGAG | |
| | CAGGAGCCGTGGGACCGGGCGCCAGCACCCTCTGCGGCGTGTCATGGGCCCGCGCCGCCGGAGCCGAAAG | |
| | CCCGAGGCCCCGAGGAGGCGCAGCCCGAGCCCGACCCCGACCCCCGGCCCCTCCCGGCGGGGCCCCTCCT | |
| | TAGGCGCTTCCTCCCATCAACACAGTCGGCGGAGACAAGGTTGGCTAAAGGAGATCCGAAAGCTTCAGAA | |
| | GAGCACACACCTCTTGATAAGGAAGCTGCCCTTCAGCCGCCTGGCAAGAGAAATATGTGTTAAATTCACT | |
| | CGTGGTGTGGACTTCAATTGGCAAGCCCAGGCCCTATTGGCCCTACAAGAGGCAGCAGAAGCATTTCTAG | |
| | TTCATCTCTTTGAGGACGCCTATCTCCTCACCTTACATGCAGGCCGAGTTACTCTCTTCCCAAAGGATGT | |
| | GCAACTGGCCCGGAGGATCCGGGGCCTTGAGGAGGGACTCGGCTGAGCTCCTGCACCCAGTGTTTCTGTC | |
| | AGTCTTTCCTGCTCAGCCAGGGGGGATGATACCGGGGACTCTCCAGAGCCATGACTAGATCCAATGGATT | |
| | CTGCGATGCTGTCTGGACTTTGCTGTCTCTGAACAGTATGTGTGTGTTGCTTTAAATATTTTTCTTTTTT | |
| | TTGAGAAGGAGAAGACTGCATGACTTTCCTCTGTAACAGAGGTAATATATGAGACAATCAACACCGTTCC | |
| | AAAGGCCTGAAAATAATTTTCAGATAAAGAGACTCCAAGGTTGACTTTAGTTTGTGAGTTACTCATGTGA | |
| | CTATTTGAGGATTTTGAAAACATCAGATTTGCTGTGGTATGGGAGAAAAGGCTATGTACTTATTATTTTA | |
| | GCTCTTTCTGTAATATTTACATTTTTTACCATATGTACATTTGTACTTTTATTTTACACATAAGGGAAAA | |
| | AATAAGACCACTTTGAGCAGTTGCCTGGAAGGCTGGGCATTTCCATCATATAGACCTCTGCCCTTCAGAG | |
| | TAGCCTCACCATTAGTGGCAGCATCATGTAACTGAGTGGACTGTGCTTGTCAACGGATGTGTAGCTTTTC | |
| | AGAAACTTAATTGGGGATGAATAGAAAACCTGTAAGCTTTGATGTTCTGGTTACTTCTAGTAAATTCCTG | |
| | TCAAAATCAATTCAGAAATTCTAACTTGGAGAATTTAACATTTTACTCTTGTAAATCATAGAAGATGTAT | |
| | CATAACAGTTCAGAATTTTAAAGTACATTTTCGATGCTTTTATGGGTATTTTTGTAGTTTCTTTGTAGAG | |
| | AGATAATAAAAATCAAAATATTTAATGAAAA | |
| GALNT7 | AGAGCCGGAGGAGGGGGAAGGAGGGAGGGGAGAGCGGTGGCGGCGGCTGCGCCGGGCTGTGAGTCTCTCG | 101 |
| NM_017423.2 | CCGCCGGAGGAAGATGAGGCTGAAGATTGGGTTCATCTTACGCAGTTTGCTGGTGGTGGGAAGCTTCCTG | |
| | GGGCTAGTGGTCCTCTGGTCTTCCCTGACCCCGCGGCCGGACGACCCAAGCCCGCTGAGCAGGATGAGGG | |
| | AAGACAGAGATGTCAATGACCCCATGCCCAACCGAGGCGGCAATGGACTAGCTCCTGGGGAGGACAGATT | |
| | CAAACCTGTGGTACCATGGCCTCATGTTGAAGGAGTAGAAGTGGACTTAGAGTCTATTAGAAGAATAAAC | |
| | AAGGCCAAAAATGAACAAGAGCACCATGCTGGAGGAGATTCCCAGAAAGATATCATGCAGAGGCAGTATC | |
| | TCACATTTAAGCCTCAGACATTCACCTACCATGATCCTGTGCTTCGCCCAGGGATCCTCGGTAACTTTGA | |
| | ACCCAAAGAACCTGAGCCTCCTGGAGTGGTTGGTGGCCCTGGAGAGAAAGCCAAGCCATTGGTTTTGGGA | |
| | CCAGAATTCAAACAAGCAATTCAAGCCAGCATTAAAGAGTTTGGATTTAACATGGTGGCAAGTGACATGA | |
| | TCTCACTGGACCGCAGCGTCAATGACTTACGCCAAGAAGAATGCAAGTATTGGCATTATGATGAAAACTT | |
| | GCTCACTTCGAGCGTTGTCATTGTCTTCCATAATGAAGGATGGTCAACCCTCATGAGAACAGTCCACAGT | |
| | GTAATTAAAAGGACTCCAAGGAAATATTTAGCAGAAATTGTGTTAATTGACGATTTCAGTAATAAAGAAC | |
| | ACTTAAAAGAAAAACTGGATGAATATATTAAGCTGTGGAATGGCCTAGTGAAGGTATTTCGAAATGAAAG | |
| | AAGGGAAGGTTTAATTCAAGCACGAAGTATTGGTGCTCAGAAGGCTAAACTTGGACAGGTTTTGATATAC | |
| | CTTGATGCCCACTGTGAGGTGGCAGTTAACTGGTATGCACCACTTGTAGCTCCCATATCTAAGGACAGAA | |
| | CCATTTGCACTGTGCCGCTTATAGATGTCATAAATGGCAACACATATGAAATTATACCCCAAGGGGGTGG | |
| | TGATGAAGATGGGTATGCCCGAGGAGCATGGGATTGGAGTATGCTCTGGAAACGGGTGCCTCTGACCCCT | |
| | CAAGAGAAGAGACTGAGAAAGACAAAAACTGAACCGTATCGGTCCCCAGCCATGGCTGGGGGATTATTTG | |
| | CCATTGAACGAGAGTTCTTCTTTGAATTGGGTCTCTATGATCCAGGTCTCCAGATTTGGGGTGGTGAAAA | |
| | CTTTGAGATCTCATACAAGATATGGCAGTGTGGTGGCAAATTATTATTTGTTCCTTGTTCTCGTGTTGGA | |
| | CATATCTACCGTCTTGAGGGCTGGCAAGGAAATCCTCCGCCCATTTATGTTGGGTCTTCTCCAACTCTGA | |
| | AGAATTATGTTAGAGTTGTGGAGGTTTGGTGGGATGAATATAAAGACTACTTCTATGCTAGTCGTCCTGA | |
| | ATCGCAGGCATTACCATATGGGGATATATCGGAGCTGAAAAAATTTCGAGAAGATCACAACTGCAAAAGT | |
| | TTTAAGTGGTTCATGGAAGAAATAGCTTATGATATCACCTCACACTACCCTTTGCCACCCAAAAATGTTG | |
| | ACTGGGGAGAAATCAGAGGCTTCGAAACTGCTTACTGCATTGATAGCATGGGAAAAACAAATGGAGGCTT | |
| | TGTTGAACTAGGACCCTGCCACAGGATGGGAGGGAATCAGCTTTTCAGAATCAATGAAGCAAATCAACTC | |
| | ATGCAGTATGACCAGTGTTTGACAAAGGGAGCTGATGGATCAAAAGTTATGATTACACACTGTAATCTAA | |
| | ATGAATTTAAGGAATGGCAGTACTTCAAGAACCTGCACAGATTTACTCATATTCCTTCAGGAAAGTGTTT | |
| | AGATCGCTCAGAGGTCCTGCATCAAGTATTCATCTCCAATTGTGACTCCAGTAAAACGACTCAAAAATGG | |
| | GAAATGAATAACATCCATAGTGTTTAGAGAGAAAAAAATAAACCAATAACCTACCTACTGACAAGTAAAT | |
| | TTATACAGGACTGAAAACCGCCTGAAACCTGCTGCAACTATTGTTATTAACTCTGTATAGCTCCAAACCT | |
| | GGAACCTCCTGATCAGTTTGAAGGACATTGATAAACTGTGATTTTACAATAACATTATCATCTGCAGTTA | |
| | CTGTTTACAAGACTGCTTTTACCTTAAACTTTGTAGATGTTTACATCTTTTTGTTGTGTTTTAAGATGAT | |
| | GTTGGTAATTTGTGCCTTTAGCTCTGTTTTATTAGACAGAGTTAAAGCATGTTGTCTTCTTTGGGATTAC | |
| | ACTCAGGGGTCTGAAAGGCAGTTTGATTTTTATTTTTAACACACTTGAAAAAAGGTTGGAGTAGCCAGAC | |
| | TTTCATATATAACTTGGTGATTATCAACCTGTTGTGTCTTTATTTAATTTTACATCTTTTTGAAGCACTG | |
| | CCACAGGTTATTAGCCAAGGTGGCCTTCCTTCACAGTCATGCTGCTTTTTTGAAAGGTGAATTTCAACAC | |
| | ATTTAGTGCCTCTTTCATTTCTCAGTATATATTTCAAGAGCTTGTGATGAAATCTATAGGATGGTAATGA | |
| | TGGACTTGTCACCTGTATGGGGAATACTTTTACTACTCAGAAATGAATTTATGTGCTGCCATTTGCTATA | |
| | AAGTTGAACTTTGTATGGCTTGAAAAAGAAATGACAATATGGAACATCCCAAGGCTGTCCCATAGGGTTG | |
| | GAAGTTGTGTAGCATTCACTCCCTTACCTACTGGCATTCCCAGTGCCCTCTGTCCATACCTACTTCTAGG | |
| | ATTGCAAAGGAGTCTTCCAACTAGAGAAAAATTGTCCACTGACATTTGGGATTTACTTTTCTCCAATACC | |
| | TGCCAATACAGAAAACTATTATCAGTTGTTATTGTTATCCCTTGAAAGCGAGGGTGACAAAAACAACAAA | |
| | ACACCGTTATAAACACATCAAAGGTTCATTCTGACTGAGGTAAGACTTTCCAAGCCCTTGTTAGATTAGG | |
| | CCTTATAAAACTTGTGTGCATTATAACCTAAGCTGTGCAACCTGTGAAGCCAAGAGTGAACTGATGTTTC | |
| | ATTTATATTTTCATCCAAATGACATTATCTGCACGTTTTTAAAATTTAAAAACAAAGGACTATTTAAAAA | |
| | TACAGTTTATTAACAAACGTGAACTACTTTCTGTTACATTAGGTGTTCCCTAGTGTTTCTTAATTTCTTT | |
| | TTAGAAAGTGTATTTTTATTAGTATTTTTCCGGTGAACAGAAGATTTGTTTGGATTTAAACATTTACTAA | |
| | GACAGTACCTATTAGGAAAACCAAATATTGCAAATGGTCAATTCGATTTTAATTTCTCAAAAGATACTCT | |
| | GTTATCCAGAAGATTAAAATGCCTACATTGAGTGCTTAAAAAAAAAAAAACAACTGTGATGATGTGAGCA | |
| | GAATGGCAAGTAAGTTAAGCATTTTTGATCCTGTAATCATGGTATCATTACAATGAAAGGAATTCACAAA | |
| | CTACTGCCAGAGGAAGTTTGTTTTTTAATTTAAGAGGGAAATATAACCTATAAATTTGTTTCTTCCAAGC | |
| | TTAGCTCTTAAATTTGGAGACTCAAAGTTAAACATCCTCAACAGAGTTTTATTTATAATTTTGAATTGTC | |
| | AATTTGTATTTTGCTACTGATCTGTGATCAACCATTTTAACTTTCATCTCTAGGGATGTTTAACATTTAT | |
| | AATTGCAAAATAAACCAACTATAAAAAAAGAAACTAAGAGAGAATTGGTACTTTAATTACTTGTGTGTTT | |
| | GCAAATAGGCTCCATTTTCCATGTTGAGTAGATTATAACCTTATTAACTATGCATAGGCCTAAGAAAGGT | |
| | GGCAATGAACTGTGCATGTAAATTTTAAATGGGTACTTTGTGCAATTCGTTAAAAGAAGATACTCTATGA | |
| | ATATGATTCTATATATTGAAATCAGAAAACCTACCAAACAAAAACATCAGAAGCTGCTGCCATAATGACT | |
| | ATTTTCTACTGTAGGCTGCTTTGGAAATAATTCCCATATCCTTGCTTTGTAAGTTGGTAATATCACTATG | |
| | CATTTCTACACATTTTATAAATTTGATTTATGCAGATTTTGATACACTGTATGTTTCTGTAGAAATTGTA | |
| | TAAATATTCAAAATTTTATTAGGATAAATTTGAGAAACTTACGTATATCTTAATTCTGGGTTGCTTGTTT | |
| | TTTAGGTGACAAAAATAAAATATTGTATTTTAATTCAAAAAAAAAAAAAAAAAAAAAAAAAAAAAAAAA | |
| DNAJC12 | AAAGGTCTAGGATGACATCTGGTGTATTGACTGTGGCCAGTCTTAAAGCTAGTTTTTGCTATGTGGAACA | 102 |
| NM_021800.2 | TGCTGCTCTAATTCAGATTTAAAGAGTTTCTTCCTGTTAATTCGAAGCTCACTGTGCCTCTTGTTTCCGA | |
| | GGGAAGAAGGACTGATTAAGTCATCTAAATGGATGCAATACTGAATTACAGGTCAGAAGATACTGAAGAT | |
| | TACTACACATTACTGGGATGTGATGAACTATCTTCGGTTGAACAAATCCTGGCAGAATTTAAAGTCAGAG | |
| | CTCTGGAATGTCACCCAGACAAGCATCCTGAAAACCCCAAAGCTGTGGAGACTTTTCAGAAACTGCAGAA | |
| | GGCAAAGGAGATTCTGACCAATGAAGAGAGTCGAGCCCGCTATGACCACTGGCGAAGGAGCCAGATGTCG | |
| | ATGCCATTCCAGCAGTGGGAAGCTTTGAATGACTCAGTGAAGACGTCAATGCACTGGGTTGTCAGAGGTA | |
| | AAAAAGACCTGATGCTGGAAGAATCTGACAAGACTCATACCACCAAGATGGAAAATGAGGAATGTAATGA | |
| | GCAAAGAGAAAGAAAGAAAGAGGAGCTGGCTTCAACCGCAGAGAAAACGGAGCAGAAAGAACCCAAGCCC | |
| | CTAGAGAAGTCAGTCTCCCCGCAAAATTCAGATTCTTCAGGTTTTGCAGATGTGAATGGTTGGCACCTTC | |
| | GTTTCCGCTGGTCCAAGGATGCTCCCTCAGAACTCCTGAGGAAGTTCAGAAACTATGAAATATGAAATAT | |
| | CTCTGCTTCAAAAAATGAGGAAGAGCAAGACTGTCCCCTATGCTGCCAACATGCAGTCTTTGTTTATGTC | |
| | TTAAAAATGTCATGTTTATGTCATGTCTGTGAATTGCTGAGTACTAATTGATTCCTCCATCCTTGAATCA | |
| | GTTCTCATAATGCTTTTTAAATAAGAAAAATTCAGAAGATGAATTTCTTCCAATATTTGAATAAATTAAA | |
| | GCTCTTAGATACAGAGTAGATTGTATTATATGCTTTTTCCTATTAATACTACTTATAGAAATCCATTAAA | |
| | AAGCAATCTCTGTACAGTGTATTTAAATATTTCATTGACATACTGTGATCTCTATTAGTGATGGATGTAC | |
| | AAAAAATGTTTTCTTACCCTTGACTTACAATGAAATGTGAAATTACTTGTCTGAACCCCGTGGGGAGAAA | |
| | TAAATAATTTTCCCAAAGTTCAAAAAAA | |
| MLPH | GCGCCGGGACGTGGCCAGTTGCCCGCCTGCCCCGGAGAGCCAGGCGCTAACCAGCCGCTCTGCGCCCCGC | 103 |
| NM_024101.5 | GCCCTGCTTGCCCCCATTATCCAGCCTTGCCCCGGCGCCCTGACCTGACGCCCTGGCCTGACGCCCTGCT | |
| | TCGTCGCCTCCTTTCTCTCCCAGGTGCTGGACCAGGGACTGAGCGTCCCCCGGAGAGGGTCCGGTGTGAC | |
| | CCCGACAAGAAGCAGAAATGGGGAAGAAACTGGATCTTTCCAAGCTCACTGATGAAGAGGCCCAGCATGT | |
| | CTTGGAAGTTGTTCAACGAGATTTTGACCTCCGAAGGAAAGAAGAGGAACGGCTAGAGGCGTTGAAGGGC | |
| | AAGATTAAGAAGGAAAGCTCCAAGAGGGAGCTGCTTTCCGACACTGCCCATCTGAACGAGACCCACTGCG | |
| | CCCGCTGCCTGCAGCCCTACCAGCTGCTTGTGAATAGCAAAAGGCAGTGCCTGGAATGTGGCCTCTTCAC | |
| | CTGCAAAAGCTGTGGCCGCGTCCACCCGGAGGAGCAGGGCTGGATCTGTGACCCCTGCCATCTGGCCAGA | |
| | GTCGTGAAGATCGGCTCACTGGAGTGGTACTATGAGCATGTGAAAGCCCGCTTCAAGAGGTTCGGAAGTG | |
| | CCAAGGTCATCCGGTCCCTCCACGGGCGGCTGCAGGGTGGAGCTGGGCCTGAACTGATATCTGAAGAGAG | |
| | AAGTGGAGACAGCGACCAGACAGATGAGGATGGAGAACCTGGCTCAGAGGCCCAGGCCCAGGCCCAGCCC | |
| | TTTGGCAGCAAAAAAAAGCGCCTCCTCTCCGTCCACGACTTCGACTTCGAGGGAGACTCAGATGACTCCA | |
| | CTCAGCCTCAAGGTCACTCCCTGCACCTGTCCTCAGTCCCTGAGGCCAGGGACAGCCCACAGTCCCTCAC | |
| | AGATGAGTCCTGCTCAGAGAAGGCAGCCCCTCACAAGGCTGAGGGCCTGGAGGAGGCTGATACTGGGGCC | |
| | TCTGGGTGCCACTCCCATCCGGAAGAGCAGCCGACCAGCATCTCACCTTCCAGACACGGCGCCCTGGCTG | |
| | AGCTCTGCCCGCCTGGAGGCTCCCACAGGATGGCCCTGGGGACTGCTGCTGCACTCGGGTCGAATGTCAT | |
| | CAGGAATGAGCAGCTGCCCCTGCAGTACTTGGCCGATGTGGACACCTCTGATGAGGAAAGCATCCGGGCT | |
| | CACGTGATGGCCTCCCACCATTCCAAGCGGAGAGGCCGGGCGTCTTCTGAGAGTCAGATCTTTGAGCTGA | |
| | ATAAGCATATTTCAGCTGTGGAATGCCTGCTGACCTACCTGGAGAACACAGTTGTGCCTCCCTTGGCCAA | |
| | GGGTCTAGGTGCTGGAGTGCGCACGGAGGCCGATGTAGAGGAGGAGGCCCTGAGGAGGAAGCTGGAGGAG | |
| | CTGACCAGCAACGTCAGTGACCAGGAGACCTCGTCCGAGGAGGAGGAAGCCAAGGACGAAAAGGCAGAGC | |
| | CCAACAGGGACAAATCAGTTGGGCCTCTCCCCCAGGCGGACCCGGAGGTGGGCACGGCTGCCCATCAAAC | |
| | CAACAGACAGGAAAAAAGCCCCCAGGACCCTGGGGACCCCGTCCAGTACAACAGGACCACAGATGAGGAG | |
| | CTGTCAGAGCTGGAGGACAGAGTGGCAGTGACGGCCTCAGAAGTCCAGCAGGCAGAGAGCGAGGTTTCAG | |
| | ACATTGAATCCAGGATTGCAGCCCTGAGGGCCGCAGGGCTCACGGTGAAGCCCTCGGGAAAGCCCCGGAG | |
| | GAAGTCAAACCTCCCGATATTTCTCCCTCGAGTGGCTGGGAAACTTGGCAAGAGACCAGAGGACCCAAAT | |
| | GCAGACCCTTCAAGTGAGGCCAAGGCAATGGCTGTGCCCTATCTTCTGAGAAGAAAGTTCAGTAATTCCC | |
| | TGAAAAGTCAAGGTAAAGATGATGATTCTTTTGATCGGAAATCAGTGTACCGAGGCTCGCTGACACAGAG | |
| | AAACCCCAACGCGAGGAAAGGAATGGCCAGCCACACCTTCGCGAAACCTGTGGTGGCCCACCAGTCCTAA | |
| | CGGGACAGGACAGAGAGACAGAGCAGCCCTGCACTGTTTTCCCTCCACCACAGCCATCCTGTCCCTCATT | |
| | GGCTCTGTGCTTTCCACTATACACAGTCACCGTCCCAATGAGAAACAAGAAGGAGCACCCTCCACATGGA | |
| | CTCCCACCTGCAAGTGGACAGCGACATTCAGTCCTGCACTGCTCACCTGGGTTTACTGATGACTCCTGGC | |
| | TGCCCCACCATCCTCTCTGATCTGTGAGAAACAGCTAAGCTGCTGTGACTTCCCTTTAGGACAATGTTGT | |
| | GTAAATCTTTGAAGGACACACCGAAGACCTTTATACTGTGATCTTTTACCCCTTTCACTCTTGGCTTTCT | |
| | TATGTTGCTTTCATGAATGGAATGGAAAAAAGATGACTCAGTTAAGGCACCAGCCATATGTGTATTCTTG | |
| | ATGGTCTATATCGGGGTGTGAGCAGATGTTTGCGTATTTCTTGTGGGTGTGACTGGATATTAGACATCCG | |
| | GACAAGTGACTGAACTAATGATCTGCTGAATAATGAAGGAGGAATAGACACCCCAGTCCCCACCCTACGT | |
| | GCACCCGCTCTGCAAGTTCCCATGTGATCTGTAGACCAGGGGAAATTACACTGCGGTCAAGGGCAGAGCC | |
| | TGCACATGACAGCAAGTGAGCATTTGATAGATGCTCAGATGCTAGTGCAGAGAGCCTGCTGGGAGACGAA | |
| | GAGACAGCAGGCAGAGCTCCAGATGGGCAAGGAAGAGGCTTGGTTCTAGCCTGGCTCTGCCCCTCACTGC | |
| | AGTGGATCCAGTGGGGCAGAGGACAGAGGGTCACAACCAATGAGGGATGTCTGCCAAGGATGGGGGTGCA | |
| | GAGGCCACAGGAGTCAGCTTGCCACTCGCCCATTGGTTACATAGATGATCTCTCAGACAGGCTGGGACTC | |
| | AGAGTTATTTCCTAGTATCGGTGTGCCCCATCCAGTTTTAAGTGGAGCCCTCCAAGACTCTCCAGAGCTG | |
| | CCTTTGAACATCCTAACAGTAATCACATCTCACCCTCCCTGAGGTTCACTTTAGACAGGACCCAATGGCT | |
| | GCACTGCCTTTGTCAGAGGGGGTGCTGAGAGGAGTGGCTTCTTTTAGAATCAAACAGTAGAGACAAGAGT | |
| | CAAGCCTTGTGTCTTCAAGCATTGACCAAGTTAAGTGTTTCCTTCCCTCTCTCAATAAGACACTTCCAGG | |
| | AGCTTTCCAATCTCTCACTTAAAACTAAGGTTTGAATCTCAAAGTGTTGCTGGGAGGCTGATACTCCTGC | |
| | AACTTCAGGAGACCTGTGAGCACACATTAGCAGCTGTTTCTCTGACTCCTTGTGGCATCAGATAAAAACG | |
| | TGGGAGTTTTTCCATATAATTCCCAGCCTTACTTATAAATTCTATTCTTTGAAAAAATTATTCAGGCTAG | |
| | GTAAGGTGGCTCATACCTATAATCCCAGCCCTTTGAGAGGCCAAGGTGGGAGAATTGCTTGAGGCCAGGA | |
| | GTTTGAGACCTCCTGGGCAACATAGTGAGATCCCATCTCTACAAAAAACAAAACAAAAAAATTACCCAAG | |
| | CATGATGGTATATGCCTGTAGTCGTACCTACTTACTTAGGAGGCTGAGGCAGGAGGATCACTTGAGCCCT | |
| | GGAGGTTGGGGCTGCAGTGAGCCATGATCGCATCACTATACTCGAGCCTGGGCAACAGAGTGAGACCTTG | |
| | TCTCTTAAAAAAATTAATAATAAATAAATGAAAATAATTCTTCAGAAAAAAAAAAAAAAAA | |
| TACSTD1 | ATGGCGCCCCCGCAGGTCCTCGCGTTCGGGCTTCTGCTTGCCGCGGCGACGGCGACTTTTGCCGCAGCTC | 104 |
| CR542259.1 | AGGAAGAATGTGTCTGTGAAAACTACAAGCTGGCCGTAAACTGCTTTGTGAATAATAATCGTCAATGCCA | |
| | GTGTACTTCAGTTGGTGCACAAAATACTGTCATTTGCTCAAAGCTGGCTGCCAAATGTTTGGTGATGAAG | |
| | GCAGAAATGAATGGCTCAAAACTTGGGAGAAGAGCAAAACCTGAAGGGGCCCTCCAGAACAATGATGGGC | |
| | TTTATGATCCTGACTGCGATGAGAGCGGGCTCTTTAAGGCCAAGCAGTGCAACGGCACCTCCATGTGCTG | |
| | GTGTGTGAACACTGCTGGGGTCAGAAGAACAGACAAGGACACTGAAATAACCTGCTCTGAGCGAGTGAGA | |
| | ACCTACTGGATCATCATTGAACTAAAACACAAAGCAAGAGAAAAACCTTATGATAGTAAAAGTTTGCGGA | |
| | CTGCACTTCAGAAGGAGATCACAACGCGTTATCAACTGGATCCAAAATTTATCACGAGTATTTTGTATGA | |
| | GAATAATGTTATCACTATTGATCTGGTTCAAAATTCTTCTCAAAAAACTCAGAATGATGTGGACATAGCT | |
| | GATGTGGCTTATTATTTTGAAAAAGATGTTAAAGGTGAATCCTTGTTTCATTCTAAGAAAATGGACCTGA | |
| | CAGTAAATGGGGAACAACTGGATCTGGATCCTGGTCAAACTTTAATTTATTATGTTGATGAAAAAGCACC | |
| | TGAATTCTCAATGCAGGGTCTAAAAGCTGGTGTTATTGCTGTTATTGTGGTTGTGGTGATAGCAGTTGTT | |
| | GCTGGAATTGTTGTGCTGGTTATTTCCAGAAAGAAGAGAATGGCAAAGTATGAGAAGGCTGAGATAAGGG | |
| | AGATGGGTGAGATGCATAGGGAACTCAATGCATAA | |
| CDC20 | GAGGCGTAAGCCAGGCGTGTTAAAGCCGGTCGGAACTGCTCCGGAGGGCACGGGCTCCGTAGGCACCAAC | 105 |
| NM_001255.2 | TGCAAGGACCCCTCCCCCTGCGGGCGCTCCCATGGCACAGTTCGCGTTCGAGAGTGACCTGCACTCGCTG | |
| | CTTCAGCTGGATGCACCCATCCCCAATGCACCCCCTGCGCGCTGGCAGCGCAAAGCCAAGGAAGCCGCAG | |
| | GCCCGGCCCCCTCACCCATGCGGGCCGCCAACCGATCCCACAGCGCCGGCAGGACTCCGGGCCGAACTCC | |
| | TGGCAAATCCAGTTCCAAGGTTCAGACCACTCCTAGCAAACCTGGCGGTGACCGCTATATCCCCCATCGC | |
| | AGTGCTGCCCAGATGGAGGTGGCCAGCTTCCTCCTGAGCAAGGAGAACCAGCCTGAAAACAGCCAGACGC | |
| | CCACCAAGAAGGAACATCAGAAAGCCTGGGCTTTGAACCTGAACGGTTTTGATGTAGAGGAAGCCAAGAT | |
| | CCTTCGGCTCAGTGGAAAACCACAAAATGCGCCAGAGGGTTATCAGAACAGACTGAAAGTACTCTACAGC | |
| | CAAAAGGCCACTCCTGGCTCCAGCCGGAAGACCTGCCGTTACATTCCTTCCCTGCCAGACCGTATCCTGG | |
| | ATGCGCCTGAAATCCGAAATGACTATTACCTGAACCTTGTGGATTGGAGTTCTGGGAATGTACTGGCCGT | |
| | GGCACTGGACAACAGTGTGTACCTGTGGAGTGCAAGCTCTGGTGACATCCTGCAGCTTTTGCAAATGGAG | |
| | CAGCCTGGGGAATATATATCCTCTGTGGCCTGGATCAAAGAGGGCAACTACTTGGCTGTGGGCACCAGCA | |
| | GTGCTGAGGTGCAGCTATGGGATGTGCAGCAGCAGAAACGGCTTCGAAATATGACCAGTCACTCTGCCCG | |
| | AGTGGGCTCCCTAAGCTGGAACAGCTATATCCTGTCCAGTGGTTCACGTTCTGGCCACATCCACCACCAT | |
| | GATGTTCGGGTAGCAGAACACCATGTGGCCACACTGAGTGGCCACAGCCAGGAAGTGTGTGGGCTGCGCT | |
| | GGGCCCCAGATGGACGACATTTGGCCAGTGGTGGTAATGATAACTTGGTCAATGTGTGGCCTAGTGCTCC | |
| | TGGAGAGGGTGGCTGGGTTCCTCTGCAGACATTCACCCAGCATCAAGGGGCTGTCAAGGCCGTAGCATGG | |
| | TGTCCCTGGCAGTCCAATGTCCTGGCAACAGGAGGGGGCACCAGTGATCGACACATTCGCATCTGGAATG | |
| | TGTGCTCTGGGGCCTGTCTGAGTGCCGTGGATGCCCATTCCCAGGTGTGCTCCATCCTCTGGTCTCCCCA | |
| | TTACAAGGAGCTCATCTCAGGCCATGGCTTTGCACAGAACCAGCTAGTTATTTGGAAGTACCCAACCATG | |
| | GCCAAGGTGGCTGAACTCAAAGGTCACACATCCCGGGTCCTGAGTCTGACCATGAGCCCAGATGGGGCCA | |
| | CAGTGGCATCCGCAGCAGCAGATGAGACCCTGAGGCTATGGCGCTGTTTTGAGTTGGACCCTGCGCGGCG | |
| | GCGGGAGCGGGAGAAGGCCAGTGCAGCCAAAAGCAGCCTCATCCACCAAGGCATCCGCTGAAGACCAACC | |
| | CATCACCTCAGTTGTTTTTTATTTTTCTAATAAAGTCATGTCTCCCTTCATGTTTTTTTTTTAAAAAAAA | |
| | AAAAAAAAAAAAAAAAA | |
| PIP | CTTCTCTGGGACACATTGCCTTCTGTTTTCTCCAGCATGCGCTTGCTCCAGCTCCTGTTCAGGGCCAGCC | 106 |
| NM_002652.2 | CTGCCACCCTGCTCCTGGTTCTCTGCCTGCAGTTGGGGGCCAACAAAGCTCAGGACAACACTCGGAAGAT | |
| | CATAATAAAGAATTTTGACATTCCCAAGTCAGTACGTCCAAATGACGAAGTCACTGCAGTGCTTGCAGTT | |
| | CAAACAGAATTGAAAGAATGCATGGTGGTTAAAACTTACCTCATTAGCAGCATCCCTCTACAAGGTGCAT | |
| | TTAACTATAAGTATACTGCCTGCCTATGTGACGACAATCCAAAAACCTTCTACTGGGACTTTTACACCAA | |
| | CAGAACTGTGCAAATTGCAGCCGTCGTTGATGTTATTCGGGAATTAGGCATCTGCCCTGATGATGCTGCT | |
| | GTAATCCCCATCAAAAACAACCGGTTTTATACTATTGAAATCCTAAAGGTAGAATAATGGAAGCCCTGTC | |
| | TGTTTGCCACACCCAGGTGATTTCCTCTAAAGAAACTTGGCTGGAATTTCTGCTGTGGTCTATAAAATAA | |
| | ACTTCTTAACATGCTTAAAAAAAAAAAAAA | |
| CDCA7 | CCTCCGGGCCCGGGTCGGCGCGCCCAGCCTGCCAGCCGCGCTGCTGCTGCTCCTCCTGCTGTGGGACCGC | 107 |
| NM_031942.4 | TGACCGCGCGGCTGCTCCGCTCTCCCCGCTCCAAGCGCCGATCTGGGCACCCGCCACCAGCATGGACGCT | |
| | CGCCGCGTGCCGCAGAAAGATCTCAGAGTAAAGAAGAACTTAAAGAAATTCAGATATGTGAAGTTGATTT | |
| | CCATGGAAACCTCGTCATCCTCTGATGACAGTTGTGACAGCTTTGCTTCTGATAATTTTGCAAACACGAA | |
| | ACCTAAATTCAGGTCAGATATCAGTGAAGAACTGGCAAATGTTTTTTATGAGGACTCTGATAATGAATCT | |
| | TTCTGCGGCTTTTCAGAAAGTGAGGTGCAAGATGTATTAGACCATTGTGGATTTTTACAGAAACCAAGGC | |
| | CAGATGTCACTAACGAACTGGCCGGTATTTTTCATGCCGACTCTGACGATGAATCATTTTGCGGTTTCTC | |
| | AGAGAGTGAGATACAAGATGGAATGAGGCTGCAGTCAGTTCGGGAAGGCTGTAGGACCCGCAGCCAGTGC | |
| | AGGCACTCTGGACCTCTCAGGGTGGCGATGAAGTTTCCAGCGCGGAGTACCAGGGGAGCAACCAACAAAA | |
| | AAGCAGAGTCCCGCCAGCCCTCAGAGAATTCTGTGACTGATTCCAACTCCGATTCAGAAGATGAAAGTGG | |
| | AATGAATTTTTTGGAGAAAAGGGCTTTAAATATAAAGCAAAACAAAGCAATGCTTGCAAAACTCATGTCT | |
| | GAATTAGAAAGCTTCCCTGGCTCGTTCCGTGGAAGACATCCCCTCCCAGGCTCCGACTCACAATCAAGGA | |
| | GACCGCGAAGGCGTACATTCCCGGGTGTTGCTTCCAGGAGAAACCCTGAACGGAGAGCTCGTCCTCTTAC | |
| | CAGGTCAAGGTCCCGGATCCTCGGGTCCCTTGACGCTCTACCCATGGAGGAGGAGGAGGAAGAGGATAAG | |
| | TACATGTTGGTGAGAAAGAGGAAGACCGTGGATGGCTACATGAATGAAGATGACCTGCCCAGAAGCCGTC | |
| | GCTCCAGATCATCCGTGACCCTTCCGCATATAATTCGCCCAGTGGAAGAAATTACAGAGGAGGAGTTGGA | |
| | GAACGTCTGCAGCAATTCTCGAGAGAAGATATATAACCGTTCACTGGGCTCTACTTGTCATCAATGCCGT | |
| | CAGAAGACTATTGATACCAAAACAAACTGCAGAAACCCAGACTGCTGGGGCGTTCGAGGCCAGTTCTGTG | |
| | GCCCCTGCCTTCGAAACCGTTATGGTGAAGAGGTCAGGGATGCTCTGCTGGATCCGAACTGGCATTGCCC | |
| | GCCTTGTCGAGGAATCTGCAACTGCAGTTTCTGCCGGCAGCGAGATGGACGGTGTGCGACTGGGGTCCTT | |
| | GTGTATTTAGCCAAATATCATGGCTTTGGGAATGTGCATGCCTACTTGAAAAGCCTGAAACAGGAATTTG | |
| | AAATGCAAGCATAATATCTGGAAAATTTGCTGCCTGCCTTCTACTTCTCAAATCTTTCTTGTAAAAGTTT | |
| | CCAATTTTTTCACTGAAACCTGAGTTAAAAATCTTGATGATCAGCCTGTTTCATAAGAAACTCCAATCAA | |
| | GTTAATCTTAGCAGACATGTGTTTCTGGAGCATCACAGAAGGTATATTGCTAGTTACACTTTGCCCTCCT | |
| | GCAGTTTCTTCTCTGCTCCCAACCCCCATCTCACAGCATCCCCCTCTATTTCCAATGCTCCTCTCCAACC | |
| | GCTTAGTTTCTGAATTTCTTTTAAATTACAGTTTTATGAAAGCATATTTTATTTACTTGGTGTTGAAATA | |
| | GCCCTCATAAAACCTAAGCACTTGGAAACACAATAATAGTATTAACTAACTAGATCTATTGAATTTCAGA | |
| | GAAGAGCCTTCTAACTTGTTTACACAAAAACGAGTATGATTTAGCATTCATACTAGTTGAAATTTTTAAT | |
| | AGAATCAAGGCACAAAAGTCTTAAAACCATGTGGAAAAATTAGGTAATTATTGCAGATTGATGTCTCTCA | |
| | ATCCCATGTATTGCGCTTATGTTACAAGTTGTTGTCACAGTTGAGACTTAATTTCTCCTAATTTCTTCTG | |
| | CCCGAAGGGTAAGTGGTGCGTCCAGCTTACACAATCATAATTCAAAGGTTGGTGGGCAATGTAATACTTA | |
| | ATTAAAATAATGATGGAAGAGCTATCTGGAGATTATGAGTAAGCTGATTTGAATTTTCAGTATAAAACTT | |
| | TAGTATAATTGTAGTTTGCAAAGTTTATTTCAGTTCACATGTAAGGTATTGCAAATAAATTCTTGGACAA | |
| | TTTTGTATGGAAACTTGATATTAAAAACTAGTCTGTGGTTCTTTGCAGTTTCTTGTAAATTTATAAACCA | |
| | GGCACAAGGTTCAAGTTTAGATTTTAAGCACTTTTATAACAATGATAAGTGCCTTTTTGGAGATGTAACT | |
| | TTTAGCAGTTTGTTAACCTGACATCTCTGCCAGTCTAGTTTCTGGGCAGGTTTCCTGTGTCAGTATTCCC | |
| | CCTCCTCTTTGCATTAATCAAGGTATTTGGTAGAGGTGGAATCTAAGTGTTTGTATGTCCAATTTACTTG | |
| | CATATGTAAACCATTGCTGTGCCATTCAATGTTTGATGCATAATTGGACCTTGAATCGATAAGTGTAAAT | |
| | ACAGCTTTTGATCTGTAATGCTTTTATACAAAAGTTTATTTTAATAATAAAATGTTTGTTCTAACTTGTC | |
| | TGCTTTTTTAAAAATAATCTTACTGTACTTAATTCTAATTTTTTCCTCATATTTAAATAAAAGGCCATTT | |
| | CCACCTTTTCAAAAAAAAAAAAAAAAAAAAAAAAAAAA | |
| MIA | GTTCTGGTTTCATAGCAACTTCTAGGTGGTGTGGGCGAAGTTTGGGACTGGTTTAGGGCGGGGACAAGAC | 108 |
| NM_006533.3 | CAAGAACACAAGTTTCCTTGTACTACGGGAGAGAGGGAGGGGAGGAAATTGGAGACCCCAGCACCCCCTT | |
| | GCTCACTCTCTTGCTCACAGTCCACGATGGCCCGGTCCCTGGTGTGCCTTGGTGTCATCATCTTGCTGTC | |
| | TGCCTTCTCCGGACCTGGTGTCAGGGGTGGTCCTATGCCCAAGCTGGCTGACCGGAAGCTGTGTGCGGAC | |
| | CAGGAGTGCAGCCACCCTATCTCCATGGCTGTGGCCCTTCAGGACTACATGGCCCCCGACTGCCGATTCC | |
| | TGACCATTCACCGGGGCCAAGTGGTGTATGTCTTCTCCAAGCTGAAGGGCCGTGGGCGGCTCTTCTGGGG | |
| | AGGCAGCGTTCAGGGAGATTACTATGGAGATCTGGCTGCTCGCCTGGGCTATTTCCCCAGTAGCATTGTC | |
| | CGAGAGGACCAGACCCTGAAACCTGGCAAAGTCGATGTGAAGACAGACAAATGGGATTTCTACTGCCAGT | |
| | GAGCTCAGCCTACCGCTGGCCCTGCCGTTTCCCCTCCTTGGCTTTATGCAAATACAATCAGCCCAGTGCA | |
| | AACGGAAAAAAAAAAAAAAAAAAA | |
| XBP1 | GGCGCTGGGCGGCTGCGGCGCGCGGTGCGCGGTGCGTAGTCTGGAGCTATGGTGGTGGTGGCAGCCGCGC | 109 |
| NM_005080.3 | CGAACCCGGCCGACGGGACCCCTAAAGTTCTGCTTCTGTCGGGGCAGCCCGCCTCCGCCGCCGGAGCCCC | |
| | GGCCGGCCAGGCCCTGCCGCTCATGGTGCCAGCCCAGAGAGGGGCCAGCCCGGAGGCAGCGAGCGGGGGG | |
| | CTGCCCCAGGCGCGCAAGCGACAGCGCCTCACGCACCTGAGCCCCGAGGAGAAGGCGCTGAGGAGGAAAC | |
| | TGAAAAACAGAGTAGCAGCTCAGACTGCCAGAGATCGAAAGAAGGCTCGAATGAGTGAGCTGGAACAGCA | |
| | AGTGGTAGATTTAGAAGAAGAGAACCAAAAACTTTTGCTAGAAAATCAGCTTTTACGAGAGAAAACTCAT | |
| | GGCCTTGTAGTTGAGAACCAGGAGTTAAGACAGCGCTTGGGGATGGATGCCCTGGTTGCTGAAGAGGAGG | |
| | CGGAAGCCAAGGGGAATGAAGTGAGGCCAGTGGCCGGGTCTGCTGAGTCCGCAGCACTCAGACTACGTGC | |
| | ACCTCTGCAGCAGGTGCAGGCCCAGTTGTCACCCCTCCAGAACATCTCCCCATGGATTCTGGCGGTATTG | |
| | ACTCTTCAGATTCAGAGTCTGATATCCTGTTGGGCATTCTGGACAACTTGGACCCAGTCATGTTCTTCAA | |
| | ATGCCCTTCCCCAGAGCCTGCCAGCCTGGAGGAGCTCCCAGAGGTCTACCCAGAAGGACCCAGTTCCTTA | |
| | CCAGCCTCCCTTTCTCTGTCAGTGGGGACGTCATCAGCCAAGCTGGAAGCCATTAATGAACTAATTCGTT | |
| | TTGACCACATATATACCAAGCCCCTAGTCTTAGAGATACCCTCTGAGACAGAGAGCCAAGCTAATGTGGT | |
| | AGTGAAAATCGAGGAAGCACCTCTCAGCCCCTCAGAGAATGATCACCCTGAATTCATTGTCTCAGTGAAG | |
| | GAAGAACCTGTAGAAGATGACCTCGTTCCGGAGCTGGGTATCTCAAATCTGCTTTCATCCAGCCACTGCC | |
| | CAAAGCCATCTTCCTGCCTACTGGATGCTTACAGTGACTGTGGATACGGGGGTTCCCTTTCCCCATTCAG | |
| | TGACATGTCCTCTCTGCTTGGTGTAAACCATTCTTGGGAGGACACTTTTGCCAATGAACTCTTTCCCCAG | |
| | CTGATTAGTGTCTAAGGAATGATCCAATACTGTTGCCCTTTTCCTTGACTATTACACTGCCTGGAGGATA | |
| | GCAGAGAAGCCTGTCTGTACTTCATTCAAAAAGCCAAAATAGAGAGTATACAGTCCTAGAGAATTCCTCT | |
| | ATTTGTTCAGATCTCATAGATGACCCCCAGGTATTGTCTTTTGACATCCAGCAGTCCAAGGTATTGAGAC | |
| | ATATTACTGGAAGTAAGAAATATTACTATAATTGAGAACTACAGCTTTTAAGATTGTACTTTTATCTTAA | |
| | AAGGGTGGTAGTTTTCCCTAAAATACTTATTATGTAAGGGTCATTAGACAAATGTCTTGAAGTAGACATG | |
| | GAATTTATGAATGGTTCTTTATCATTTCTCTTCCCCCTTTTTGGCATCCTGGCTTGCCTCCAGTTTTAGG | |
| | TCCTTTAGTTTGCTTCTGTAAGCAACGGGAACACCTGCTGAGGGGGCTCTTTCCCTCATGTATACTTCAA | |
| | GTAAGATCAAGAATCTTTTGTGAAATTATAGAAATTTACTATGTAAATGCTTGATGGAATTTTTTCCTGC | |
| | TAGTGTAGCTTCTGAAAGGTGCTTTCTCCATTTATTTAAAACTACCCATGCAATTAAAAGGTACAATGCA | |
| C4orf34 | AGAAACGGCAGTGGCAGCAGCGTCCGGAGCAGCCGCAGCCTTCTGGAAGCTCCAGGCGGTCTTTCTGCCG | 110 |
| NM_174921.1 | AGCCTCGGTCCCGGCCCCCATCCTCCCCGCCCCATCGGTTGTTGTCTGGGCGGATTTAAACAGTCAAGTA | |
| | AAATCAAGCTGGGTAATCATGGCAGAAGGTGGATTTGATCCCTGTGAATGTGTTTGCTCTCATGAACATG | |
| | CAATGAGAAGACTGATCAATCTGTTACGGCAGTCCCAGTCCTACTGCACAGACACAGAGTGTCTTCAGGA | |
| | ATTACCGGGACCCTCTGGTGATAATGGCATCAGTGTTACAATGATCTTGGTAGCCTGGATGGTTATTGCA | |
| | TTGATCTTGTTCTTACTGAGACCTCCTAATCTAAGAGGATCCAGCCTACCTGGAAAGCCAACCAGTCCTC | |
| | ATAATGGACAAGATCCACCAGCTCCTCCTGTGGACTAACTTTGTGATATGGGAAGTGAAAATAGTTAACA | |
| | CCTTGCACGACCAAACGAACGAAGATGACCAGAGTACTCTTAACCCCATTAGAACTGTTTTTCCTTTTGT | |
| | ATCTGCAATATGGGATGGTATTGTTTTCATGAGCTTCTAGAAATTTCACTTGCAAGTTTATTTTTGCTTC | |
| | CTGTGTTACTGCCATTCCTATTTACAGTATATTTGAGTGAATGATTATATTTTTAAAAAGTTACATGGGG | |
| | CTTTTTTGGTTGTCCTAAACTTACAAACATTCCACTCATTCTGTTTGTAACTGTGATTATAATTTTTGTG | |
| | ATAATTTCTGGCCTGATTGAAGGAAATTTGAGAGGTCTGCATTTATATATTTTAAATAGATTTGATAGGT | |
| | TTTTAAATTGCTTTTTTTCATAAGGTATTTATAAAGTTATTTGGGGTTGTCTGGGATTGTGTGAAAGAAA | |
| | ATTAGAACCACGCTGTATTTACATTTACCTTGGTAGTTTATTTGTGGATGGCAGTTTTCTGTAGTTTTGG | |
| | GGACTGTGGTAGCTCTTGGATTGTTTTGCAAATTACAGCTGAAATCTGTGTCATGGATTAAACTGGCTTA | |
| | TGTGGCTAGAATAGGAAGAGAGAAAAAATGAAATGGTTGTTTACTAATTTTATACTCCCATTAAAAATCT | |
| | CTAATGTTAAGAAAACCTTAAATAAACATGATTGATCAATATGGCAGATGATTTACAGTCCATTATATGA | |
| | CATTTGTAAGCCACTCAACACTAGCCTTACAAGGTTCATGAAAGGAGGAAAACATTAATTCTTTCTGCCT | |
| | TTGCTGATATAATCCACATAGTAATAATTTAAGCTATAATTTATTTTTAAAATGAGTGCCTCTTGGGAAG | |
| | CTTCTTTTCTGTTCTAACAGTTCCCTGTTAAAATGAAAATCTTAGGCCAGTGCAGTGGCTCACACCTGTA | |
| | ATCTCAGCACTTTGGGAGGCTGAGGTGGGTGGATCACTTGAGGTCAGGAGTTCGAGACCAGCCTGGCCAA | |
| | CATGGTGAAACCCTGTCTCTACTAAAAATACAGAAAAATTAGCCAGGGTTGGTGCATGTGCCTGTAATCC | |
| | CAGCTACTCAGGAGGCCAAAGCAGGAGAATTGCTTGAACCCGGGAGGTGGAGGTTGCAGTGAACCAAGAT | |
| | CGCACCACTGCATTCCAGCCTAAGCAATAGAGCGAGACTCCCTCCCAAAAAAAAAAAAAAAAAAAAAAAA | |
| | AAA | |
| VAV3 | CGGCCGCATCCTTGCCGCCCGCCCCGGCCCAGCCGCGTCCCGGAGCCGTCGGGCATGGAGCCGTGGAAGC | 111 |
| NM_006113.4 | AGTGCGCGCAGTGGCTCATCCATTGCAAGGTGCTGCCCACCAACCACCGGGTGACCTGGGACTCGGCTCA | |
| | GGTGTTCGACCTTGCGCAGACCCTCCGCGATGGAGTCCTGCTCTGCCAGCTGCTTAACAACCTCCGGGCG | |
| | CACTCCATCAACCTGAAGGAGATCAACCTGAGGCCGCAGATGTCCCAGTTTCTCTGTTTGAAGAACATAA | |
| | GGACATTTCTCACGGCCTGTTGTGAGACGTTTGGAATGAGGAAAAGTGAACTTTTCGAGGCATTTGACTT | |
| | GTTTGATGTTCGTGACTTTGGAAAGGTTATAGAAACATTATCACGACTTTCTCGAACACCTATAGCATTG | |
| | GCCACAGGAATCAGGCCCTTCCCAACAGAAGAAAGCATTAATGATGAAGACATCTACAAAGGCCTTCCTG | |
| | ATTTAATAGATGAAACCCTTGTGGAAGATGAAGAAGATCTCTATGACTGTGTTTATGGGGAAGATGAAGG | |
| | TGGAGAAGTCTATGAGGACTTAATGAAGGCAGAGGAAGCACATCAGCCCAAATGTCCAGAAAATGATATA | |
| | CGAAGTTGTTGTCTAGCAGAAATTAAGCAGACAGAAGAAAAATATACAGAAACTTTGGAGTCAATAGAAA | |
| | AGTATTTCATGGCACCACTAAAAAGATTTCTGACAGCAGCAGAATTTGATTCAGTATTCATCAACATTCC | |
| | TGAACTTGTAAAACTTCATCGGAACCTAATGCAAGAGATTCATGATTCCATTGTAAATAAAAATGACCAG | |
| | AACTTGTACCAAGTTTTTATTAACTACAAGGAAAGATTGGTTATTTACGGGCAGTACTGCAGTGGAGTGG | |
| | AGTCAGCCATCTCTAGTTTAGACTACATTTCTAAGACAAAAGAAGATGTCAAACTGAAATTAGAGGAATG | |
| | TTCCAAAAGAGCAAATAATGGGAAATTTACTCTTCGAGACTTGCTTGTGGTTCCTATGCAACGTGTTTTA | |
| | AAGTACCACCTTCTCCTCCAGGAACTGGTCAAACATACCACTGATCCGACTGAGAAGGCAAATCTGAAAC | |
| | TGGCTCTTGATGCCATGAAGGACTTGGCACAATATGTGAATGAAGTGAAAAGAGATAATGAGACCCTTCG | |
| | TGAAATTAAACAGTTTCAGCTATCTATAGAGAATTTGAACCAACCAGTTTTGCTTTTTGGACGACCTCAG | |
| | GGAGATGGTGAAATTCGAATAACCACTCTAGACAAGCATACCAAACAAGAAAGGCATATCTTCTTATTTG | |
| | ATTTGGCAGTGATCGTATGTAAGAGAAAAGGTGATAACTATGAAATGAAGGAAATAATAGATCTTCAGCA | |
| | GTACAAGATAGCCAATAATCCTACAACCGATAAAGAAAACAAAAAGTGGTCTTATGGCTTCTACCTCATC | |
| | CATACCCAAGGACAAAATGGGTTAGAATTTTATTGCAAAACAAAAGATTTAAAGAAGAAATGGCTAGAAC | |
| | AGTTTGAAATGGCTTTGTCTAACATAAGACCAGACTATGCAGACTCCAATTTCCACGACTTCAAGATGCA | |
| | TACCTTCACTCGAGTCACATCCTGCAAAGTCTGCCAGATGCTCCTGAGGGGAACATTTTATCAAGGCTAT | |
| | TTATGTTTTAAGTGTGGAGCGAGAGCACACAAAGAATGTTTGGGAAGAGTAGACAATTGTGGCAGAGTTA | |
| | ATTCTGGTGAACAAGGGACACTCAAACTACCAGAGAAACGGACCAATGGACTGCGAAGAACTCCTAAACA | |
| | GGTGGATCCAGGTTTACCAAAGATGCAGGTCATTAGGAACTATTCTGGAACACCACCCCCAGCTCTGCAT | |
| | GAAGGACCCCCTTTACAGCTCCAGGCCGGGGATACCGTTGAACTTCTGAAAGGAGATGCACACAGTCTGT | |
| | TTTGGCAGGGCAGAAATTTAGCATCTGGAGAGGTTGGATTTTTTCCAAGTGATGCAGTCAAGCCTTGCCC | |
| | ATGTGTGCCCAAACCAGTAGATTATTCTTGCCAACCCTGGTATGCTGGAGCAATGGAAAGATTGCAAGCA | |
| | GAGACCGAACTTATTAATAGGGTAAATAGTACTTACCTTGTGAGGCACAGGACCAAAGAGTCAGGAGAAT | |
| | ATGCAATTAGCATTAAGTACAATAATGAAGCAAAGCACATCAAGATTTTAACAAGAGATGGCTTTTTTCA | |
| | CATTGCAGAAAATAGAAAATTTAAAAGTTTAATGGAACTTGTGGAGTACTACAAGCATCATTCTCTCAAG | |
| | GAAGGGTTCAGAACCTTAGATACAACTCTGCAGTTTCCATACAAGGAGCCAGAACATTCAGCTGGACAGA | |
| | GGGGTAATAGAGCAGGCAACAGCTTGTTAAGTCCAAAAGTGCTGGGCATTGCCATCGCTCGGTATGACTT | |
| | CTGTGCAAGAGATATGAGAGAGTTGTCCTTGTTGAAAGGAGATGTGGTGAAGATTTACACAAAGATGAGT | |
| | GCAAATGGCTGGTGGAGAGGAGAAGTAAATGGCAGGGTGGGCTGGTTTCCATCCACATATGTGGAAGAGG | |
| | ATGAATAAATTCAAATCCCGTGTTGCACCCTGCACCAAAAATTTCAGAGAAGGGATAAATAGAAGCCTGC | |
| | ACAGCATCGTGAATTAACTGAAGTGTTTAAAAAGCTGCATTTCTGGCTGTTCAACATCCTCCCTCCTTAG | |
| | CCCCTCCTAAGTCTTAATGCTGAGATTTCTAAAGATGCTGGTACTGACAGATTAATGGCTTGCCTAGAGC | |
| | TGTGCAAGAAACAGCCTGCCAGTCTGTCATTGTCAGGGACCAGGGCAAAACCAAGAGCTGTTCTTCCCAG | |
| | AAGAGCCCTGCAAACACATTGGTTCGTGCTTCCCTTTACTTCTTCTGGTCAGATACCATGAATGCCAGTC | |
| | ATCAGTAAATCTTAATACACTTTTGCTTTATTCTCACATGCCATTCACCAGATTATTTGATGGTACAAAG | |
| | AAGCAGAAGTGTAATTTTCCTTTTCCCAGCATGACGAAAAATTGGAGTTCTGCCATTTGAGCAGCTTACT | |
| | GGAAAGATCCAGCCTTACTTGTCTTAAATTGTCCAACAAGGTGACTCATTGCCCGGCAAACACTTTTACC | |
| | CTCAGATGTTACTCATGATATTATAAAATATGAGGCCAGTGCTCAGGTTTGCATCATAAGTGAGCTATCC | |
| | CTGAAGGGTTTTAATTACTTATTTGGTGTCCTGATTATATTTGCAAACTTCTTTATAAAAGGTGAAAAAA | |
| | GCACACAAAAGAGAGGGTGTCTTCATATTAAACCTTCACAACCTTCATGATTTCATAGGATTATTTTGGA | |
| | AATATAGCACTTGACTTTATGAAAGGATCTGGGCTAGGTATATTAAGGGTAGTTGCCAATAACCTGAAGA | |
| | AGCTGGCATTGTTTACAGAAACAGATCAAGGGCTATAATTTATGTCATTTTATAGCAGCAGTATCTATTA | |
| | ATACATGCCTTTTCCTCCCATCCACCTCCCCCGCACACACACAAAGATGACCTGGGACATGATTTTTTTA | |
| | TTCCCACATTTTCTTGGAGCACAAACAACTTTGTTGAGGATTTTGGAAGGAAAGCACAACTGGGTCCTTT | |
| | ATTCATTTCTGGGACAGAAAGAGGGTCAGTGGACTTTTGTGGGCCTCCAGCTTCTCTCAGAGTCTCCCCC | |
| | TCTGCAGCCCATCCTGGGAGTGTATTAACTGGAGGGAAGATGGGTCTTGCAGTACATTTGTTTTGCCCAG | |
| | CCATCACTCTTTTTTGTGAGGAGCCTAAATACATTCTTCCTGGGGTCCAGAGTCCCCATTCAAGGCAGTC | |
| | AAGTTAAGACACTAACTTGGCCCTTTCCTGATGGAAATATTTCCTCCATAGCAGAAGTTGTGTTCTGACA | |
| | AGACTGAGAGAGTTACATGTTGGGAAAAAAAAGAAGCATTAACTTAGTAGAACTGAACCAGGAGCATTAA | |
| | GTTCTGAAATTTTGAATCATCTCTGAAATGAAGCAGGTGTAGCCTGCCCTCTCATCAATCCGTCTGGGTG | |
| | CCAGAACTCAAGGTTCAGTGGACACATCCCCCTGTTAGAGACCCTCATGGGCTAGGACTTTTCATCTAGG | |
| | ATAGATTCAAGACCTTTACCTCAGAATTATGTAAACTGTGATTGTGTTTTAGAAAAATTATTATTTGCTA | |
| | AAACCATTTAAGTCTTTGTATATGTGTAAATGATCACAAAAATGTATTTTATAAAATGTTCTGTACAATA | |
| | AAGTTACACCTCAAAGTGTACTCTTGGAATGGATTCTTTCCTGTAAAGTCTTATCTGCGACTCTGTCTCG | |
| | GGAATGTTTTGTCTGTTGCCGTCAGCCGAACTTTGTTATGGAGGGAGCAGCCTCACACAAGCAGAAACAC | |
| | TCCTGTGGATGGTATTGTAGCATGTATTGTTTATTTTAGTCAATAGACCCTCTCCTTATAAATGGTGTTT | |
| | AGTCTTCCTGTTGCATTTCATGGGCCTGGGGGTTTCCTAGCAGAGGATATTGGAGCCCCTTTTTGTGACA | |
| | TTACCAATTACATCTTTGTCCACGTTTAATACTTTGTTTTGGAAAATTTAAATGCTGCAGATTTGTGTAG | |
| | AGTTCTAATACCAAAGACAGAAGTAAATGTTTTCCATATACTTTGTCTTGCCTGTATGCAGCCCTCGTGT | |
| | AATACGGTGAATTAGAGTGGTATTTCACTTTGTATTATTTTGTAAATATGTCAATATAATAAATAGTGAC | |
| | TAAATTGATAAAAAAA | |
| GRB7 | ACCCGCCCCCATCTGCCCAAGATAATTTTAGTTTCCTTGGGCCTGGAATCTGGACACACAGGGCTCCCCC | 112 |
| NM_005310.3 | CCGCCTCTGACTTCTCTGTCCGAAGTCGGGACACCCTCCTACCACCTGTAGAGAAGCGGGAGTGGATCTG | |
| | AAATAAAATCCAGGAATCTGGGGGTTCCTAGACGGAGCCAGACTTCGGAACGGGTGTCCTGCTACTCCTG | |
| | CTGGGGCTCCTCCAGGACAAGGGCACACAACTGGTTCCGTTAAGCCCCTCTCTCGCTCAGACGCCATGGA | |
| | GCTGGATCTGTCTCCACCTCATCTTAGCAGCTCTCCGGAAGACCTTTGCCCAGCCCCTGGGACCCCTCCT | |
| | GGGACTCCCCGGCCCCCTGATACCCCTCTGCCTGAGGAGGTAAAGAGGTCCCAGCCTCTCCTCATCCCAA | |
| | CCACCGGCAGGAAACTTCGAGAGGAGGAGAGGCGTGCCACCTCCCTCCCCTCTATCCCCAACCCCTTCCC | |
| | TGAGCTCTGCAGTCCTCCCTCACAGAGCCCAATTCTCGGGGGCCCCTCCAGTGCAAGGGGGCTGCTCCCC | |
| | CGCGATGCCAGCCGCCCCCATGTAGTAAAGGTGTACAGTGAGGATGGGGCCTGCAGGTCTGTGGAGGTGG | |
| | CAGCAGGTGCCACAGCTCGCCACGTGTGTGAAATGCTGGTGCAGCGAGCTCACGCCTTGAGCGACGAGAC | |
| | CTGGGGGCTGGTGGAGTGCCACCCCCACCTAGCACTGGAGCGGGGTTTGGAGGACCACGAGTCCGTGGTG | |
| | GAAGTGCAGGCTGCCTGGCCCGTGGGCGGAGATAGCCGCTTCGTCTTCCGGAAAAACTTCGCCAAGTACG | |
| | AACTGTTCAAGAGCTCCCCACACTCCCTGTTCCCAGAAAAAATGGTCTCCAGCTGTCTCGATGCACACAC | |
| | TGGTATATCCCATGAAGACCTCATCCAGAACTTCCTGAATGCTGGCAGCTTTCCTGAGATCCAGGGCTTT | |
| | CTGCAGCTGCGGGGTTCAGGACGGAAGCTTTGGAAACGCTTTTTCTGCTTCTTGCGCCGATCTGGCCTCT | |
| | ATTACTCCACCAAGGGCACCTCTAAGGATCCGAGGCACCTGCAGTACGTGGCAGATGTGAACGAGTCCAA | |
| | CGTGTACGTGGTGACGCAGGGCCGCAAGCTCTACGGGATGCCCACTGACTTCGGTTTCTGTGTCAAGCCC | |
| | AACAAGCTTCGAAATGGCCACAAGGGGCTTCGGATCTTCTGCAGTGAAGATGAGCAGAGCCGCACCTGCT | |
| | GGCTGGCTGCCTTCCGCCTCTTCAAGTACGGGGTGCAGCTGTACAAGAATTACCAGCAGGCACAGTCTCG | |
| | CCATCTGCATCCATCTTGTTTGGGCTCCCCACCCTTGAGAAGTGCCTCAGATAATACCCTGGTGGCCATG | |
| | GACTTCTCTGGCCATGCTGGGCGTGTCATTGAGAACCCCCGGGAGGCTCTGAGTGTGGCCCTGGAGGAGG | |
| | CCCAGGCCTGGAGGAAGAAGACAAACCACCGCCTCAGCCTGCCCATGCCAGCCTCCGGCACGAGCCTCAG | |
| | TGCAGCCATCCACCGCACCCAACTCTGGTTCCACGGGCGCATTTCCCGTGAGGAGAGCCAGCGGCTTATT | |
| | GGACAGCAGGGCTTGGTAGACGGCCTGTTCCTGGTCCGGGAGAGTCAGCGGAACCCCCAGGGCTTTGTCC | |
| | TCTCTTTGTGCCACCTGCAGAAAGTGAAGCATTATCTCATCCTGCCGAGCGAGGAGGAGGGCCGCCTGTA | |
| | CTTCAGCATGGATGATGGCCAGACCCGCTTCACTGACCTGCTGCAGCTCGTGGAGTTCCACCAGCTGAAC | |
| | CGCGGCATCCTGCCGTGCTTGCTGCGCCATTGCTGCACGCGGGTGGCCCTCTGACCAGGCCGTGGACTGG | |
| | CTCATGCCTCAGCCCGCCTTCAGGCTGCCCGCCGCCCCTCCACCCATCCAGTGGACTCTGGGGCGCGGCC | |
| | ACAGGGGACGGGATGAGGAGCGGGAGGGTTCCGCCACTCCAGTTTTCTCCTCTGCTTCTTTGCCTCCCTC | |
| | AGATAGAAAACAGCCCCCACTCCAGTCCACTCCTGACCCCTCTCCTCAAGGGAAGGCCTTGGGTGGCCCC | |
| | CTCTCCTTCTCCTAGCTCTGGAGGTGCTGCTCTAGGGCAGGGAATTATGGGAGAAGTGGGGGCAGCCCAG | |
| | GCGGTTTCACGCCCCACACTTTGTACAGACCGAGAGGCCAGTTGATCTGCTCTGTTTTATACTAGTGACA | |
| | ATAAAGATTATTTTTTGATACAAAAAAAAAAAAAAAAAAAAAAAA | |
| UBE2C | AAACGCGGGCGGGCGGGCCCGCAGTCCTGCAGTTGCAGTCGTGTTCTCCGAGTTCCTGTCTCTCTGCCAA | 113 |
| NM_007019.2 | CGCCGCCCGGATGGCTTCCCAAAACCGCGACCCAGCCGCCACTAGCGTCGCCGCCGCCCGTAAAGGAGCT | |
| | GAGCCGAGCGGGGGCGCCGCCCGGGGTCCGGTGGGCAAAAGGCTACAGCAGGAGCTGATGACCCTCATGA | |
| | TGTCTGGCGATAAAGGGATTTCTGCCTTCCCTGAATCAGACAACCTTTTCAAATGGGTAGGGACCATCCA | |
| | TGGAGCAGCTGGAACAGTATATGAAGACCTGAGGTATAAGCTCTCGCTAGAGTTCCCCAGTGGCTACCCT | |
| | TACAATGCGCCCACAGTGAAGTTCCTCACGCCCTGCTATCACCCCAACGTGGACACCCAGGGTAACATAT | |
| | GCCTGGACATCCTGAAGGAAAAGTGGTCTGCCCTGTATGATGTCAGGACCATTCTGCTCTCCATCCAGAG | |
| | CCTTCTAGGAGAACCCAACATTGATAGTCCCTTGAACACACATGCTGCCGAGCTCTGGAAAAACCCCACA | |
| | GCTTTTAAGAAGTACCTGCAAGAAACCTACTCAAAGCAGGTCACCAGCCAGGAGCCCTGACCCAGGCTGC | |
| | CCAGCCTGTCCTTGTGTCGTCTTTTTAATTTTTCCTTAGATGGTCTGTCCTTTTTGTGATTTCTGTATAG | |
| | GACTCTTTATCTTGAGCTGTGGTATTTTTGTTTTGTTTTTGTCTTTTAAATTAAGCCTCGGTTGAGCCCT | |
| | TGTATATTAAATAAATGCATTTTTGTCCTTTTTTAGACAAAAAAAAAAAAAAA | |
| PH-4 | ATGGCGGCAGCGGCGGTGACAGGCCAGCGGCCTGAGACCGCGGCGGCCGAGGAGGCCTCGAGGCCGCAGT | 114 |
| AY198406.1 | GGGCGCCGCCAGACCACTGCCAGGCTCAGGCGGCGGCCGGGCTGGGCGACGGCGAGGACGCACCGGTGCG | |
| | TCCGCTGTGCAAGCCCCGCGGCATCTGCTCGCGCGCCTACTTCCTGGTGCTGATGGTGTTCGTGCACCTG | |
| | TACCTGGGTAACGTGCTGGCGCTGCTGCTCTTCGTGCACTACAGCAACGGCGACGAAAGCAGCGATCCCG | |
| | GGCCCCAACACCGTGCCCAGGGCCCCGGGCCCGAGCCCACCTTAGGTCCCCTCACCCGGCTGGAGGGCAT | |
| | CAAGGTGGGGCACGAGCGTAAGGTCCAGCTGGTCACCGACAGGGATCACTTCATCCGAACCCTCAGCCTC | |
| | AAGCCGCTGCTCTTCGAAATCCCCGGCTTCCTGACTGATGAAGAGTGTCGGCTCATCATCCATCTGGCGC | |
| | AGATGAAGGGGTTACAGCGCAGCCAGATCCTGCCTACTGAAGAGTATGAAGAGGCAATGAGCACTATGCA | |
| | GGTCAGCCAGCTGGACCTCTTCCGGCTGCTGGACCAGAACCGTGATGGGCACCTTCAGCTCCGTGAGGTT | |
| | CTGGCCCAGACTCGCCTGGGAAATGGATGGTGGATGACTCCAGAGAGCATTCAGGAGATGTACGCCGCGA | |
| | TCAAGGCTGACCCTGATGCTGACGGAGTGCTGAGTCTGCAGGAGTTCTCCAACATGGACCTTCGGGACTT | |
| | CCACAAGTACATGAGGAGCCACAAGGCAGAGTCCAGTGAGCTGGTGCGGAACAGCCACCATACCTGGCTC | |
| | TACCAGGGTGAGGGTGCCCACCACATCATGCGTGCCATCCGCCAGAGGGTGCTGCGCCTCACTCGCCTGT | |
| | CGCCTGAGATCGTGGAGCTCAGCGAGCCGCTGCAGGTTGTTCGATATGGTGAGGGGGGCCACTACCATGC | |
| | CCACGTGGACAGTGGGCCTGTGTACCCAGAGACCATCTGCTCCCATACCAAGCTGGTAGCCAACGAGTCT | |
| | GTACCCTTCGAGACCTCCTGCCGCTACATGACAGTGCTGTTTTATTTGAACAACGTCACTGGTGGGGGCG | |
| | AGACTGTTTTCCCTGTAGCAGATAACAGAACCTACGATGAAATGAGTCTGATTCAGGATGACGTGGACCT | |
| | CCGTGACACACGGAGGCACTGTGACAAGGGAAACCTGCGTGTCAAGCCCCAACAGGGCACAGCAGTCTTC | |
| | TGGTACAACTACCTGCCTGATGGGCAAGGTTGGGTGGGTGACGTAGACGACTACTCGCTGCACGGGGGCT | |
| | GCCTGGTCACGCGCGGCACCAAGTGGATTGCCAACAACTGGATTAATGTGGACCCCAGCCGAGCGCGGCA | |
| | AGCGCTGTTCCAACAGGAGATGGCCCGCCTTGCCCGAGAAGGGGGCACCGACTCACAGCCCGAGTGGGCT | |
| | CTGGACCGGGCCTACCGCGATGCGCGCGTGGAACTCTGA | |
| ART3 | ATTCCTGTCTCAGCTCTCACTGTCAACAACATCCCATCCTGAAGACTTGCTTACCACAACTGAGAGTGGG | 115 |
| NM_001130016.2 | GAGTCAGTTTGAGGCCTAGCATCACTTAAACTTCCTCCAAAGGCACAAAAGCCAGAAGAGAAAAATGAAG | |
| | ACGGGACATTTTGAAATAGTCACCATGCTGCTGGCAACCATGATTCTAGTGGACATTTTCCAGGTGAAGG | |
| | CTGAAGTGTTAGACATGGCAGATAATGCATTTGATGATGAATACCTGAAATGTACGGACAGGATGGAAAT | |
| | TAAATACGTTCCCCAACTGCTAAAGGAGGAAAAAGCAAGCCACCAGCAATTAGATACTGTGTGGGAAAAT | |
| | GCAAAAGCCAAATGGGCAGCCCGAAAGACTCAAATCTTTCTCCCTATGAATTTTAAGGATAACCATGGAA | |
| | TAGCCCTGATGGCATATATTTCCGAAGCTCAAGAGCAAACTCCCTTTTACCATCTGTTCAGTGAAGCTGT | |
| | GAAGATGGCTGGCCAATCTCGAGAAGATTATATCTATGGCTTCCAGTTCAAAGCTTTCCACTTTTACCTC | |
| | ACAAGAGCCCTGCAGTTGCTGAGAAAACCTTGTGAGGCCAGTTCCAAAACTGTGGTATATAGAACAAGCC | |
| | AGGGCACTTCATTTACATTTGGAGGGCTAAACCAAGCCAGGTTTGGCCATTTTACCTTGGCATATTCAGC | |
| | CAAACCTCAGGCTGCTAATGACCAGCTCACTGTGTTATCCATCTACACATGCCTTGGAGTTGACATTGAA | |
| | AATTTTCTTGATAAAGAAAGTGAAAGAATTACTTTAATACCTCTGAATGAGGTTTTTCAAGTGTCACAGG | |
| | AGGGGGCTGGCAATAACCTTATCCTTCAAAGCATAAACAAGACCTGCAGCCATTATGAGTGTGCATTTCT | |
| | AGGTGGACTAAAAACCGAAAACTGTATTGAGAACCTAGAATATTTTCAACCCATCTATGTCTACAACCCT | |
| | GGTGAGAAAAACCAGAAGCTTGAAGACCATAGTGAGAAAAACTGGAAGCTTGAAGACCATGGTGAGAAAA | |
| | ACCAGAAGCTTGAAGACCATGGTGTGAAAATCCTTGAACCCACCCAAATACCTGGAATGAAAATTCCAGA | |
| | ACCTTTTCCACTACCTGAAGATAAAAGTCAAGGAAATATCAACAATCCTACTCCAGGTCCAGTTCCTGTT | |
| | CCAGGTCCCAAAAGCCATCCTTCTGCATCCTCGGGCAAACTGCTGCTTCCACAGTTTGGGATGGTCATCA | |
| | TTTTAATCAGTGTTTCTGCTATAAATCTCTTTGTTGCTCTGTAGTTTGATGCATTGTTTATCTTTCTTAT | |
| | TCTTTACTTGAAATAACTATAGGGATCCACAGGAGATCAAAAGGAATGATGTATTTTTTACGTGTTGGCC | |
| | AAAGTCACTGGATAAAATGAGAATTGTATATTTGTTATTCATTTTGCAAATTCAGAAAGTTGGTCCAGAT | |
| | ATATGTCACAGAACTTTTCACTTGTATACTACTCTTACAATGGAAAAAAATCCCGAAAACTGTATACTTC | |
| | TGATTAAATTCAATAAAAGATTTTGATTAGATATTTCAGAATTGCCAAAAAAAAAAAAAAAAAAAAAAAA | |
| | AAA | |
| MELK | GAGATTTGATTCCCTTGGCGGGCGGAAGCGGCCACAACCCGGCGATCGAAAAGATTCTTAGGAACGCCGT | 116 |
| NM_014791.3 | ACCAGCCGCGTCTCTCAGGACAGCAGGCCCCTGTCCTTCTGTCGGGCGCCGCTCAGCCGTGCCCTCCGCC | |
| | CCTCAGGTTCTTTTTCTAATTCCAAATAAACTTGCAAGAGGACTATGAAAGATTATGATGAACTTCTCAA | |
| | ATATTATGAATTACATGAAACTATTGGGACAGGTGGCTTTGCAAAGGTCAAACTTGCCTGCCATATCCTT | |
| | ACTGGAGAGATGGTAGCTATAAAAATCATGGATAAAAACACACTAGGGAGTGATTTGCCCCGGATCAAAA | |
| | CGGAGATTGAGGCCTTGAAGAACCTGAGACATCAGCATATATGTCAACTCTACCATGTGCTAGAGACAGC | |
| | CAACAAAATATTCATGGTTCTTGAGTACTGCCCTGGAGGAGAGCTGTTTGACTATATAATTTCCCAGGAT | |
| | CGCCTGTCAGAAGAGGAGACCCGGGTTGTCTTCCGTCAGATAGTATCTGCTGTTGCTTATGTGCACAGCC | |
| | AGGGCTATGCTCACAGGGACCTCAAGCCAGAAAATTTGCTGTTTGATGAATATCATAAATTAAAGCTGAT | |
| | TGACTTTGGTCTCTGTGCAAAACCCAAGGGTAACAAGGATTACCATCTACAGACATGCTGTGGGAGTCTG | |
| | GCTTATGCAGCACCTGAGTTAATACAAGGCAAATCATATCTTGGATCAGAGGCAGATGTTTGGAGCATGG | |
| | GCATACTGTTATATGTTCTTATGTGTGGATTTCTACCATTTGATGATGATAATGTAATGGCTTTATACAA | |
| | GAAGATTATGAGAGGAAAATATGATGTTCCCAAGTGGCTCTCTCCCAGTAGCATTCTGCTTCTTCAACAA | |
| | ATGCTGCAGGTGGACCCAAAGAAACGGATTTCTATGAAAAATCTATTGAACCATCCCTGGATCATGCAAG | |
| | ATTACAACTATCCTGTTGAGTGGCAAAGCAAGAATCCTTTTATTCACCTCGATGATGATTGCGTAACAGA | |
| | ACTTTCTGTACATCACAGAAACAACAGGCAAACAATGGAGGATTTAATTTCACTGTGGCAGTATGATCAC | |
| | CTCACGGCTACCTATCTTCTGCTTCTAGCCAAGAAGGCTCGGGGAAAACCAGTTCGTTTAAGGCTTTCTT | |
| | CTTTCTCCTGTGGACAAGCCAGTGCTACCCCATTCACAGACATCAAGTCAAATAATTGGAGTCTGGAAGA | |
| | TGTGACCGCAAGTGATAAAAATTATGTGGCGGGATTAATAGACTATGATTGGTGTGAAGATGATTTATCA | |
| | ACAGGTGCTGCTACTCCCCGAACATCACAGTTTACCAAGTACTGGACAGAATCAAATGGGGTGGAATCTA | |
| | AATCATTAACTCCAGCCTTATGCAGAACACCTGCAAATAAATTAAAGAACAAAGAAAATGTATATACTCC | |
| | TAAGTCTGCTGTAAAGAATGAAGAGTACTTTATGTTTCCTGAGCCAAAGACTCCAGTTAATAAGAACCAG | |
| | CATAAGAGAGAAATACTCACTACGCCAAATCGTTACACTACACCCTCAAAAGCTAGAAACCAGTGCCTGA | |
| | AAGAAACTCCAATTAAAATACCAGTAAATTCAACAGGAACAGACAAGTTAATGACAGGTGTCATTAGCCC | |
| | TGAGAGGCGGTGCCGCTCAGTGGAATTGGATCTCAACCAAGCACATATGGAGGAGACTCCAAAAAGAAAG | |
| | GGAGCCAAAGTGTTTGGGAGCCTTGAAAGGGGGTTGGATAAGGTTATCACTGTGCTCACCAGGAGCAAAA | |
| | GGAAGGGTTCTGCCAGAGACGGGCCCAGAAGACTAAAGCTTCACTATAACGTGACTACAACTAGATTAGT | |
| | GAATCCAGATCAACTGTTGAATGAAATAATGTCTATTCTTCCAAAGAAGCATGTTGACTTTGTACAAAAG | |
| | GGTTATACACTGAAGTGTCAAACACAGTCAGATTTTGGGAAAGTGACAATGCAATTTGAATTAGAAGTGT | |
| | GCCAGCTTCAAAAACCCGATGTGGTGGGTATCAGGAGGCAGCGGCTTAAGGGCGATGCCTGGGTTTACAA | |
| | AAGATTAGTGGAAGACATCCTATCTAGCTGCAAGGTATAATTGATGGATTCTTCCATCCTGCCGGATGAG | |
| | TGTGGGTGTGATACAGCCTACATAAAGACTGTTATGATCGCTTTGATTTTAAAGTTCATTGGAACTACCA | |
| | ACTTGTTTCTAAAGAGCTATCTTAAGACCAATATCTCTTTGTTTTTAAACAAAAGATATTATTTTGTGTA | |
| | TGAATCTAAATCAAGCCCATCTGTCATTATGTTACTGTCTTTTTTAATCATGTGGTTTTGTATATTAATA | |
| | ATTGTTGACTTTCTTAGATTCACTTCCATATGTGAATGTAAGCTCTTAACTATGTCTCTTTGTAATGTGT | |
| | AATTTCTTTCTGAAATAAAACCATTTGTGAATATAG | |
| CDCA8 | ATTGGGCGGAAGACCCTGGGCCGGCAGGAACTTGCTTGTGATTGGATGTTGTGGGACGGCGGCTTCTCAT | 117 |
| NM_001256875.1 | TCGTCAGCCTGTGACTGTGGAGTTTGAATTGGGTGGCGGTTGACTGTAGAGCCGCTCTCTCTCACTGGCA | |
| | CAGCGAGGTTTTGCTCAGCCCTTGTCTCGGGACCGCAGGTACGTGCCTGGCGACTTCTTCGGGTGGTCCC | |
| | CGTCCGCCCTCCTCGTCCCTACCCAGTTTCTTGCTTCCCTGCCCCATCTCCGCCGCTCCCCGCAGCCTCC | |
| | GCCGAGCGCCATGGCTCCTAGGAAGGGCAGTAGTCGGGTGGCCAAGACCAACTCCTTACGGAGGCGGAAG | |
| | CTCGCCTCCTTTCTGAAAGACTTCGACCGTGAAGTGGAAATACGAATCAAGCAAATTGAGTCAGACAGGC | |
| | AGAACCTCCTCAAGGAGGTGGATAACCTCTACAACATCGAGATCCTGCGGCTCCCCAAGGCTCTGCGCGA | |
| | GATGAACTGGCTTGACTACTTCGCCCTTGGAGGAAACAAACAGGCCCTGGAAGAGGCGGCAACAGCTGAC | |
| | CTGGATATCACCGAAATAAACAAACTAACAGCAGAAGCTATTCAGACACCCCTGAAATCTGCCAAAACAC | |
| | GAAAGGTAATACAGGTAGATGAAATGATAGTGGAAGAGGAAGAAGAAGAAGAAAATGAACGTAAGAATCT | |
| | TCAAACTGCAAGAGTCAAAAGGTGTCCTCCATCCAAGAAGAGAACTCAGTCCATACAAGGAAAAGGAAAA | |
| | GGGAAAAGGTCAAGCCGTGCTAACACTGTTACCCCAGCCGTGGGCCGATTGGAGGTGTCCATGGTCAAAC | |
| | CAACTCCAGGCCTGACACCCAGGTTTGACTCAAGGGTCTTCAAGACCCCTGGCCTGCGTACTCCAGCAGC | |
| | AGGAGAGCGGATTTACAACATCTCAGGGAATGGCAGCCCTCTTGCTGACAGCAAAGAGATCTTCCTCACT | |
| | GTGCCAGTGGGCGGCGGAGAGAGCCTGCGATTATTGGCCAGTGACTTGCAGAGGCACAGTATTGCCCAGC | |
| | TGGATCCAGAGGCCTTGGGAAACATTAAGAAGCTCTCCAACCGTCTCGCCCAAATCTGCAGCAGCATACG | |
| | GACCCACAAATGAGACACCAAAGTTGACAGGATGGACTTTTAATGGGCACTTCTGGGACCCTGAAGAGAC | |
| | TTCTTCCCTTCAGGCTTATTGTTTGAGTGTGAAGTTCCAGAGCAAGGAGCCATGTTCCTCTAAGGGAATT | |
| | CAGGAATTCAGACGTGCTAGTCCCACACCAGTTAGGTAGAGCTGTCTGTTCACCCTCCCATCCCAGCTGA | |
| | TCCCAGTCACTGCTTGCTGGGGCCATGCCATGGAAGCTTCCCATCAGTCTCCCAGCTGAATCCTCCCTGC | |
| | TCTCTGAGCTGCTGCCTTTTGCCTCCTGCAACTCAACATCCTCTTCACCCTGCCCTGCCTGCAGTTGAGG | |
| | GGGCGAAGAAGAACCCTGTGTTCTCAGGAAGACTGCCTCCACCACCGCTACCCAGAGAACCTCTGCATCT | |
| | GGCATTTCTGCTCTCTATGCTTGAGACCGGGAGGTTTAGGCTCAGATAAGTGAGCTCTGGGCCATGAGAG | |
| | GGTAGGTCCAGAAGGTGGGGGGAACTGTACAGATCAGCAGAGCAGGACAGTTGGCAGCAGTGACCTCAGT | |
| | AGGGAACATGTCCGTCTACCCTCTCGCACTCATGACACCTCCCCCTACCAGCCCTCCTCTTCCTCCTCCT | |
| | CCTCCTCCTGTGGGAGGTGGTCAGTGGGACTTAGGGATCTTTCACCTGCTGTGCCCAGTAGTTCTGAAGT | |
| | CTGCTTGTGGAGCAGTGTTTTATGTTTATCCCTGTTTACTGAAGACCAAATACTGGTTTGGAGACAACTT | |
| | CCATGTCTTGCTCTTCTACCTCCCTAGTTAGTGGAAATTTGGATAAGGGAACTGTAGGGCCCAGATTCTG | |
| | GAGGTTTTATGTCATTGGCCACAGAATAACTGTCTCTAAGCTATCCATGGTCCAGTGGTCCCTGCCAAGT | |
| | CTGTAGACTTCAGAGAGCACTTCTCTCTTATGGGGTTCATGGGAACAGGGGTGGGTGTGACTTGCTTGGT | |
| | GGCCTCATTCCATGTGTGCCTGTGCCTGGGGCATGGACTTTGTTAAGCAGAGTCAGCAGTGAGGTCCTCA | |
| | TTCTCCAGCCAGCCTCTCTGCCCTGGAGAATCATGTGCTATGTTCTAAGAATTTGAGAACTAGAGTCCTC | |
| | ATCCCCAGGCTTGAAGGCACATGGCTTTCTCATGTAGGGCTCTCTGTGGTATTTGTTATTATTTTGCAAC | |
| | AAGACCATTTTAGTAAAACAGTCCTGTTCAAGTTGTATTCTTTTAAGTTCTTTTATTCTCCTTTCCCTGA | |
| | GATTTTTGTATATATTGTTCTGAGTAATGGTATCTTTGAGCTGATTGTTCTAATCAGAGCTGGTACCTAC | |
| | TTTCAATAAATTCTGGTTTTGTGTTTTCTTTTGTAAAAAAAAAAAAAAAAAA | |
| DNALI1 | GGCGGTTTCCATGGTGACGGCAAACAAGGCCCACACTGGACAGGGCAGCTGCTGGGTTGCTACTCTCGCC | 118 |
| NM_003462.3 | TCCGCCATGATTCCGCCCGCAGACTCTTTGCTCAAGTACGACACCCCAGTGCTGGTGAGCCGGAACACGG | |
| | AGAAACGGAGCCCCAAGGCTCGGCTACTGAAAGTCAGCCCCCAGCAGCCTGGACCTTCAGGTTCAGCCCC | |
| | ACAGCCACCCAAGACCAAGCTCCCCTCAACTCCCTGTGTCCCAGATCCTACAAAGCAGGCAGAAGAAATC | |
| | TTGAATGCCATACTACCCCCAAGGGAGTGGGTGGAAGACACGCAGCTATGGATCCAGCAGGTGTCCAGCA | |
| | CCCCTAGCACCAGGATGGACGTGGTGCACCTCCAGGAGCAGTTAGACTTAAAGCTGCAGCAGCGGCAGGC | |
| | CAGGGAAACAGGCATCTGCCCTGTCCGCAGGGAACTCTACTCACAGTGTTTTGATGAGTTGATCCGGGAG | |
| | GTCACCATCAACTGTGCGGAGAGGGGGCTGCTGCTGCTGCGAGTCCGGGACGAGATCCGCATGACCATCG | |
| | CTGCCTACCAGACCCTGTACGAGAGCAGCGTGGCGTTTGGCATGAGGAAGGCACTGCAGGCTGAGCAGGG | |
| | GAAGTCAGACATGGAGAGGAAAATCGCAGAATTGGAGACGGAAAAGAGAGACCTGGAGAGGCAAGTGAAC | |
| | GAGCAGAAGGCAAAATGTGAAGCCACTGAGAAGCGGGAGAGCGAGAGGCGGCAGGTGGAGGAGAAGAAGC | |
| | ACAATGAGGAGATTCAGTTCCTGAAGCGAACAAATCAGCAGCTGAAGGCCCAACTGGAAGGCATTATTGC | |
| | ACCAAAGAAGTGATAATTTCCACATGATTAATTTCCAACAAGACACTTGGGAGTTATTTACTGTGTTCCT | |
| | CTGGCAGCCAATAAAATCATCATAAGCCCTTTGTAATAAAAAGCTAGTTTCCTGAGTGAACAAGCCATAA | |
| | CCTCCCCTAAACACCACCTAGGTATTTGTTAGAAGTCACACTATTACTCCAATGTCATCAGACACCTAAG | |
| | GTCTGCCAGCCAGGCTCCTGGCTGGGCAATGGAAGATGGTGTGGCCCTGTTAGTCTCCGTGTGTGGCTTA | |
| | CTAGCCAGCCTTGGGAACTGCCAACTCAAATTCTAAGAAAGCCACTGCTTTCTCATCATCACTCTATACC | |
| | AATACTTATTTCTGGCCAAATGAATCTGCTTCTCTGCCCCTCAAACTTTTAGTTCACAATTCATCTTCTA | |
| | CCTTAACTTGGGCTTCTTGGGCCTCTGGCCTTCCTTACTTAATGTCTTCTTTTCCCTACTCTAATGCATT | |
| | TCTAACTCACTTTGGAGCTTTGGTTTTCTAATGTATTATCCCCACTTGCCAGTCAACTGGACCCCTTCCT | |
| | CCTCGGTTTCAGACTGCCTACATTAGGAAACAATGGCAGTCAAACCCATGGCTTTGGAGAAAGTAAATGT | |
| | TTGCCAGAAAGGAATACTAGTCACAGTGGCCTTTGTGAGTTGTCTGCAACTCAGCTCTTCCCCCAGCACA | |
| | GATCTGTTCCCCTTATCCTGCAGAAAATCAAGCCCTGACTCTGCACTCCCCGAAGTAGTGATGTTAATTA | |
| | ACAACTGAAGAGGTAACTAAATCTCACATGCAGGTCTAATGACTAATAATTGGAGTACGGCTGCTAGACA | |
| | ACTGCATTTTAGTATTTCTCTTCCATTCTCCTGGTTTTGTAGACCCAGAAGATTGAATGAGTGACATAAA | |
| | TCTTTAGTTCGGGGCAAGCCAGGGTGGGCTAGGGTGGTAAGCTGGAGGACTTCATCCTTCAGTTAGGCTG | |
| | CACAAGTAACATTACCTAAAAGGCACTAACATGCTCAGGTTCCCCAGAAAGAGGCGTAAGAAGGGCCTCT | |
| | CCTTAGCAGAGCTTCCACCTGCCATCCGTCTTGGGTTCAGTGAGCTTCAAGGCTCACAATGGAAGCACTG | |
| | TCATTTCCCCAGAAAAGCTGTGTTCCCTATGCTGAACACACCATACACATTCTCATCTGGAATCTAAGGA | |
| | GCAGCTTTTACCCTGATCCAGTATCCTGAGGAATTTTAAGCCTCCACTCAAATGACCTGCCTGTGTTGTC | |
| | ATTTCCATGGGAAAGAACTCTTTCCACGAGATCTGCTAGTTCCAGGCCTCTAAGACAGGAACGTATGTGC | |
| | CATAAGTGGGTCTACTTCACAGACTCAATGAGGCAGAAATTATTGTAGTTTTCTCCTATTTCTTCTGCAC | |
| | CCAACTTTCTCCTTGTATTTCAAAGGCCAGGCCATGTACACTAACGTCCTTGAAATTTGCAGTTCTGTAT | |
| | GCTTCTATTCCAAATCATTCATTACCAATAAAAACGAAATACCACCCTTTCCATTTTATAGACCTCATCC | |
| | CCTATTTCTGTCAGACAGTTATATGACAGGGTGACTGTGGAACCTCTTAGTTCATCCAAAGTCTACCTGA | |
| | AGTGCTAGACTTTCAGACTCTTATCACTGAAATCCTTAAGGTTGAGGAGGCTTTATTTCCCTAGCACTGG | |
| | TGAAGGGCTTCAACTGTCAAACCTCAGAACAAATGCATTAGGGCCTTAGAAATGTCAATGGGGCAGGAAG | |
| | AAAACACAATTTCTAACTGCCTGTTTTTGTATAATTTAATAAAAACCTTTTAAACATTAAAAAAAAAAAA | |
| | AAA | |
| KIAA1370 | GAAAGCGAAGCAGAAGCCGTAGAATCAGCGGCGAGCCTGTTGAAAGAACCCACAGGTGCATTTCACAGCA | 119 |
| BC109128.2 | CTCTGGGCGAAAATTGGATGTGAAAATGAAGCCAGACCGAGATACTCTGGATGAATATTTTGAATATGAT | |
| | GCAGAGGAGTTCTTGGTCTCTTTGGCCTTGCTGATAACAGAAGGACGAACACCTGAATGTTCTGTAAAAG | |
| | GTCGAACAGAAAGCTTTCATTGCCCTCCAGCACAGTCTTGTTACCCAGTAACTACCAAACATGAATGTAG | |
| | TGACAAGCTGGCCCAGTGCCGCCAAGCCAGACGAACTAGGTCTGAGGTCACATTGTTGTGGAAGAATAAC | |
| | CTTCCAATCATGGTGGAAATGATGCTACTACCAGACTGCTGCTACAGCGATGATGGGCCCACCACAGAGG | |
| | GAATTGATCTAAATGATCCTGCGATTAAGCAAGATGCATTATTATTAGAAAGATGGATCTTGGAGCCAGT | |
| | TCCTCGACAGAATGGTGACCGATTTATTGAAGAGAAGACGCTTCTGTTGGCTGTCCGCTCATTTGTGTTT | |
| | TTTTCTCAGTTAAGTGCATGGCTGAGTGTTTCTCATGGTGCTATTCCACGAAATATTCTCTACAGAATCA | |
| | GTGCTGCTGATGTAGACCTACAGTGGAATTTTTCACAGACTCCAATTGAGCATGTGTTTCCTGTTCCCAA | |
| | TGTTTCTCACAATGTTGCCTTGAAAGTCAGTGTTCAGTCCTTGCCCAGACAATCTAATTATCCAGTTTTG | |
| | ACGTGCAGTATTCACACTAATATTGGCCTTTATGAGAAAAGAATTCAACAACATAAACTTAAAACTCATC | |
| | AGCACCATAACCCAAATGAAGCAGAACAATGTGGTACAAACAGTTCACAGCGTCTGTGTAGCAAACAAAC | |
| | TTGGACCATGGCACCTGAAAGTGTGTTACATGCAAAAAGTGGCCCAAGTCCAGAATATACTGCAGCTGTC | |
| | AAAAATATCAAACTATATCCAGGCACTGGCAGTAAATCTGACCATGGGACATCTCAAGCCAATATTCTAG | |
| | GCTTTAGTGGTATAGGTGATATAAAATCACAAGAAACATCAGTGAGAACTTTAAAATCATTTTCAATGGT | |
| | TGATTCCAGTATCTCTAACCGCCAGAGTTTCTGGCAGTCAGCTGGTGAGACTAACCCTTTAATAGGCTCT | |
| | TTAATTCAGGAGCGGCAAGAAATCATTGCAAGAATTGCCCAACATTTGATTCATTGTGATCCAAGCACTT | |
| | CACATGTTTCTGGACGTCCATTTAATACTCAGGAGTCTAGTTCACTCCATTCAAAACTTTTCCGGGTTTC | |
| | ACAAGAAAATGAGAACGTGGGAAAAGGTAAAGAAGCTTTCTCCATGACTTTTGGTAGTCCAGAGTTTAGT | |
| | TCCCCAGAAGACACCAATGAGGGGAAAATTCGACTAAAACCAGAAACTCCTCGAAGTGAAACTTGTATTT | |
| | CTAATGACTTTTATTCTCATATGCCTGTTGGAGAGACTAATCCTTTGATAGGCTCTTTACTCCAGGAGCG | |
| | GCAAGATGTTATTGCAAGGATTGCTCAACACTTGGAGCACATTGATCCAACAGCATCACATATCCCCCGG | |
| | CAGTCATTCAACATGCATGACTCCAGTTCGGTTGCATCTAAAGTGTTTAGGAGTTCATATGAAGACAAAA | |
| | ATTTGTTGAAGAAAAATAAGGATGAGTCCTCAGTTTCCATTTCTCACACAAAATGTTCCTTGTTAGGAGA | |
| | CATCAGTGATGGGAAAAACTTAGTACCTAATAAATGTTTTACTTCTTTTAAAAATAATAGTAAAGAAAAG | |
| | TGTTCTTTGAAACATCAAACAAGAAATCAGTGTCAGAACAATCCTAGTGAAATCATCCAAAGTACGTATC | |
| | AGGAGACACAGAACAAAAGTTCTAGTTTATCGGCTTCCTCAATTTTGTCTCAGCACAAAGAAAATAACTT | |
| | AGATTTGACAAGCAGATTCAAGGAGCAAGAAATGAGCAATGGAATTGATAAACAGTATTCAAATTGCACC | |
| | ACTATTGACAAACAGATTTGTACAAATAAGTATAAGGAAAAAATAATAAATGAGAACTATAATCCAAAAT | |
| | TCTTTGGCAATCTTCAGTCTGATGATTCCAAAAAAAATGACTCAAAAATAAAAGTTACTGTGTTGGAAAT | |
| | GTCTGAATATTTGAACAAATATGAAAGCATGTCCTCAAATAAAGACTCAAAAAGGCCTAAGACATGTGAG | |
| | CAAAATACTCAACTTAATAGCATAGAGAATTATCTCAATAAAGATAATGAAGGTTTCAAATGTAAAAAGT | |
| | CAGACCAATTAAAAAATGAACAAGATAAGCAAGAAGATCCAACTAATGAAAAATCCCAAAACTATTCTCA | |
| | GAGAAGAAGTATAAAAGACTGTTTGTCTACATGTGAGCAACCAAAAAATACAGAGGTATTGAGGACTACA | |
| | CTGAAACATTCAAATGTGTGGCGAAAACATAATTTTCATTCCTTGGATGGAACTTCAACCAGAGCCTTTC | |
| | ATCCTCAAACTGGATTGCCTCTTCTTTCAAGCCCTGTTCCTCAAAGAAAAACACAATCAGGTTGCTTTGA | |
| | TCTGGATTCTTCATTACTACATCTGAAAAGCTTCTCATCTAGAAGTCCTCGACCATGTTTAAACATTGAA | |
| | GATGATCCAGATATTCATGAAAAACCATTTTTGAGTTCTAGTGCTCCACCTATAACAAGTCTTAGTCTCC | |
| | TAGGAAATTTTGAGGAATCTGTCTTGAACTATCGTTTCGATCCTCTCGGCATTGTTGATGGTTTTACTGC | |
| | CGAGGTAGGGGCAAGTGGTGCTTTCTGCCCCACACATTTGACTCTTCCAGTTGAAGTGTCATTCTACAGT | |
| | GTTTCAGATGACAATGCTCCCTCTCCTTATATGGGTGTGATTACTTTAGAGTCCCTTGGTAAAAGGGGTT | |
| | ATCGAGTACCTCCTTCAGGAACAATACAAGTGACCTTATTTAATCCTAATAAGACTGTGGTGAAGATGTT | |
| | TGTTGTGATATATGATTTACGAGATATGCCAGCCAATCATCAGACATTCCTACGACAAAGAACTTTTTCT | |
| | GTACCTGTTAAACAAGAAGTGAAGAGAAGTGTTAATAAAGAGAACATCCGACACACAGAAGAACGGTTAT | |
| | TACGCTACCTCATACATCTGAGGTTCCAGAGTTCTAAATCTGGAAAGATCTACCTCCATAGAGACGTACG | |
| | GCTCCTGTTCTCTAGAAAGTCAATGGAGGTTGATAGCGGTGCTGCATATGAACTCAAATCTTACACTGAA | |
| | TCACCAACAAACCCTCAGTTTTCACCAAGATGTTGATAAGGAGTGATGATTTAAAGTATTTACTCAGTAC | |
| | CCAAGTTTGCAAGTAAAAATTAGCATAGAATGGAGTGTACCAAATTAACAATCAGGAGAGTGGATTCTCT | |
| | CCTGTTATCCTGGACCAGTTTTTATGAAAGGATTCCTGAAATGAAATCCATATATTCCATGTAGACTGGA | |
| | AAAACTCATGTCCTAATCCTTTTTGTACTGTTGAAACCACTTCATTGGACATG | |
| THSD4 | GACTTGAACGCAACTCCCAATTGCAGAAAATTGGCAACGTCTCTGAAGAGCCCTTGCTTTTGCCTGGACC | 120 |
| NM_024817.2 | CCCAGCATCATGGTTTCCCATTTCATGGGGTCTCTCAGTGTCCTGTGTTTCCTTCTGCTGCTTGGATTCC | |
| | AGTTCGTCTGCCCACAGCCCTCCACTCAACACAGGAAGGTCCCGCAGCGGATGGCGGCGGAGGGCGCCCC | |
| | CGAGGACGACGGCGGCGGCGGCGCCCCGGGAGTGTGGGGCGCCTGGGGCCCCTGGTCGGCCTGCTCGCGT | |
| | AGCTGCAGCGGCGGCGTGATGGAGCAGACGCGGCCCTGCCTGCCCCGCTCCTACCGCCTGCGCGGCGGCC | |
| | AGCGGCCTGGCGCCCCTGCGCGCGCCTTCGCGGACCACGTGGTGTCGGCGGTGCGCACGTCGGTGCCACT | |
| | GCACCGGAGCCGCGACGAGACGCCAGCGCTGGCCGGTACGGACGCCAGCCGCCAGGGCCCCACGGTGCTG | |
| | CGAGGCAGCCGGCACCCACAGCCCCAGGGCCTCGAAGTCACTGGGGACAGAAGGAGCAGGACCCGTGGTA | |
| | CCATTGGCCCTGGCAAGTATGGCTATGGTAAGGCCCCATATATCTTACCACTGCAGACAGACACTGCACA | |
| | CACGCCACAGAGGCTCCGGAGACAGAAGCTCTCATCCCGCCATTCCAGGTCCCAGGGAGCATCTTCTGCT | |
| | AGGCATGGCTACAGTTCACCAGCCCACCAGGTCCCCCAACATGGGCCTTTGTACCAAAGTGACAGTGGCC | |
| | CTCGCTCTGGACTGCAGGCTGCGGAGGCCCCCATCTACCAGCTACCTTTGACCCATGATCAAGGCTACCC | |
| | TGCAGCTTCAAGTCTCTTTCACAGCCCAGAAACAAGCAACAACCACGGTGTGGGGACCCATGGGGCAACT | |
| | CAGAGCTTCTCTCAGCCTGCCCGATCTACAGCAATCTCATGCATCGGGGCCTATCGGCAGTACAAGCTGT | |
| | GCAACACCAACGTATGTCCAGAAAGCAGTAGAAGTATCCGGGAGGTACAGTGTGCATCCTACAACAACAA | |
| | GCCATTCATGGGCCGGTTTTATGAGTGGGAACCATTTGCAGAAGTAAAAGGCAATCGCAAATGTGAGTTG | |
| | AACTGCCAGGCAATGGGCTACCGCTTCTATGTACGGCAAGCTGAGAAAGTCATCGATGGCACCCCCTGTG | |
| | ACCAGAACGGCACGGCCATCTGTGTGTCTGGGCAGTGCAAGAGCATTGGCTGTGATGACTACTTAGGCTC | |
| | CGACAAAGTCGTGGACAAATGTGGGGTGTGTGGAGGAGACAACACGGGCTGTCAGGTTGTGTCGGGCGTG | |
| | TTTAAGCATGCCCTCACCAGCCTGGGCTACCACCGCGTCGTGGAGATTCCCGAGGGAGCCACGAAAATCA | |
| | ACATCACGGAGATGTACAAGAGCAACAACTATTTGGCCCTGAGAAGTCGTTCTGGACGCTCCATCATCAA | |
| | TGGGAACTGGGCAATTGATCGACCAGGAAAATACGAGGGCGGAGGGACCATGTTCACCTACAAGCGTCCA | |
| | AATGAGATTTCGAGCACTGCCGGAGAGTCCTTTTTGGCGGAAGGTCCCACCAACGAGATCTTGGATGTCT | |
| | ACATGATACACCAGCAGCCAAACCCAGGCGTGCACTACGAGTACGTGATCATGGGGACCAACGCCATCAG | |
| | CCCCCAGGTGCCACCCCACAGGAGACCAGGGGAACCCTTCAATGGCCAGATGGTGACAGAAGGCAGGAGC | |
| | CAGGAGGAGGGAGAACAGAAAGGGAGGAACGAGGAGAAGGAAGACTTGCGTGGGGAGGCCCCTGAGATGT | |
| | TCACCTCAGAATCGGCACAGACCTTCCCAGTCAGGCATCCAGACAGATTTTCTCCCCATCGACCGGACAA | |
| | CTTGGTGCCACCAGCACCGCAGCCCCCACGGCGCAGCCGGGATCACAACTGGAAGCAGCTTGGGACAACA | |
| | GAATGTTCCACGACCTGTGGGAAAGGATCGCAGTACCCTATTTTCCGCTGTGTGCACAGAAGCACTCATG | |
| | AAGAGGCTCCTGAGAGTTACTGTGACTCCAGCATGAAGCCGACCCCCGAGGAGGAGCCCTGCAACATCTT | |
| | CCCTTGCCCAGCCTTCTGGGACATCGGGGAGTGGTCTGAGTGCAGCAAGACCTGTGGCCTGGGCATGCAG | |
| | CACCGCCAGGTTCTGTGCCGCCAGGTGTACGCCAACCGCAGCCTGACGGTGCAGCCCTACCGCTGCCAGC | |
| | ACCTGGAGAAACCTGAGACCACCAGCACCTGCCAACTCAAGATCTGCAGCGAGTGGCAGATCCGGACCGA | |
| | CTGGACCTCGTGCTCGGTGCCCTGCGGCGTGGGACAGAGGACCCGTGATGTGAAGTGTGTGAGCAACATT | |
| | GGGGATGTGGTTGACGATGAGGAATGCAACATGAAGCTCCGGCCGAATGACATTGAGAACTGCGACATGG | |
| | GACCCTGTGCCAAGAGCTGGTTCCTCACCGAGTGGAGCGAAAGGTGCTCAGCGGAGTGTGGGGCCGGAGT | |
| | GCGGACACGCTCGGTGGTGTGCATGACCAACCATGTCAGCAGCCTGCCCCTGGAGGGCTGTGGGAACAAC | |
| | CGGCCGGCAGAGGCCACCCCATGTGACAACGGACCCTGCACGGGCAAGGTGGAGTGGTTTGCCGGGAGCT | |
| | GGAGTCAGTGTTCCATCGAGTGTGGGAGCGGGACGCAACAGAGGGAGGTGATTTGTGTTAGAAAGAATGC | |
| | AGACACCTTTGAAGTGTTGGACCCCTCTGAATGTTCTTTCCTGGAGAAACCCCCCAGCCAGCAATCCTGC | |
| | CACCTCAAGCCTTGCGGAGCCAAATGGTTTAGCACCGAATGGAGCATGTGTTCCAAGAGCTGCCAGGGTG | |
| | GCTTTCGGGTCCGGGAAGTGCGGTGTCTGTCTGATGACATGACTCTAAGTAACCTCTGTGACCCTCAGTT | |
| | GAAACCAGAAGAGAGAGAATCTTGTAACCCTCAGGACTGTGTCCCTGAAGTTGATGAAAACTGCAAGGAC | |
| | AAGTACTACAACTGCAACGTGGTGGTCCAGGCAAGACTCTGTGTCTACAACTACTACAAGACCGCCTGCT | |
| | GTGCCTCCTGCACCCGTGTGGCCAACAGGCAGACGGGCTTCCTGGGGAGCAGATAACACTCCTGCACCCC | |
| | CATCAGTAGGGCAGCATCACTGCCTTCCCGGGGGCTTCAGCAGTGCGCCTGGCTGGCTGCTGCTCCACCA | |
| | CGGGCCCCCTGGCCCAGGCGCTGCCAACCAACTTAGTCACCACCCCTGCCTCCGGTGAATGCACCCCGTG | |
| | GTACCCAGGGGCTTTTTACACAAGATGTTTGAAAGCCACAGTCAGTCCTTTAAGCATCACCATGTACTGA | |
| | TGATCCCCTCCTTGGACCTGGCATCTGCTAATGGTGCCCTTTGAAAGTCAAGCAGTGGGAAGTACATGGA | |
| | GCTCTCAGCCCTGCTCCCATCTGGCACCTTCAAGTCAGCAGATGGGCCACTGACTGAGCACTGCCCCGTC | |
| | CCTGGTGCTACTGGTCTTTCTAAACTTAGCACCCTGGAGAGTCCAAGGAGGCAGCGCCCCCAACCCAGCG | |
| | CCCCACTAAGCCTTGCTGACACGCGTGCATCCCTCTGTGACCTCAGCCCAGATGTGCCTGTTTTCATTCT | |
| | CAAAGACATTAGACTGTTTTCCTGCCCTATGACACAGATAGCTCACATGAATATTGTGCTTTATTTAGCA | |
| | GGTGTACTCACAGATACTAGCTCCTTAGCAGCTCACAACATCCCAGAATGGGAGGCAGGGGGTGACTCAT | |
| | TATCCCCATTTTACTGACAGGGAAACTGAGGCTCAACTTAAGTAATTGACCTGCCAGGTATATTCACCCA | |
| | TCCAGTGGAAGAGCTGAGTCCCCGCCCCAGTCATCTACCAGTATCCAGCCTGGGGCCTGTACTTAGATGT | |
| | GAAAGGTGCTGCTTCATTTCTGACCAAGAGACTGAGAAGTTTCCCAGAATGCAAACAAAGCCCAGGCCCC | |
| | TGAAATCTTTCCGGTCAAGCCTTTATCCCAGCACTCAGTTGTTTTGGATGTCTGTTCCTACTTGCCCTTA | |
| | CCCCCAAAGTTACAGATCCTAGTTACAGGACTCTGCCAGCTTTGTTAAACTGTCCGTGAGACAAGAAAGC | |
| | CATTGGGGAAACCAGGTGATTGCCTGAAATTCTTACTCCGTTCCAAGTGCTGTTCCTCCCAGGAAATCAA | |
| | AGGCCAGGGTCCTTATGGCCGTGGAGCCTTCCCGACCACAGAGCCAACTTGTGAAGCACACAGCTCTGCA | |
| | GCCTGGGCTCTGCCCTGCCTCAGCCGCCTCCCCCACGCTCTTCACCACGTTCCTGGAGAGTCCGGCCAAC | |
| | CTGTCCCAGCCGAAACACTGCTGTATTAGAAAAAGTCTCTTTCTGGTCTTTCTGGTTTTGTTTATGAATT | |
| | TCCCTCTGTGGCCACAAATTCCTCCCCTCCCCCATGACTCACAGTCCATATGGCCCACCCCCAGACTTGA | |
| | GCACCAAGCTCTGCATTAATGCAGTTGGCCTGCGACAAGGAGCTGTGGACCCTTCCCCATCTCTTCCAAT | |
| | TCACTTTCCCCAACTATCCAGTTCCAGAGGCCGCAGGCCTGGAAGGATGCAGTGCATATTGAAAGGTGGA | |
| | CCCTCTGAAAACAGTTAAGAGGAATATATGTATGTTTTACCCATTAAGAAAAAATGGCAAGCTAAACAAA | |
| | TGTTAAACTTACAGAAAATTTGTCTTATGGTCCTGAGCATATTTCCCTTTTAGAGCAAGCCTGGATTCTT | |
| | AGCAAAGTGTTTCCCCCATTTGCTCTTTTAGCTGACAAATCTGCCACTGTGATGATGGTTTGCAGCTTTT | |
| | GGAAGCAGTATGGCAACCTGGCCTGACATGCTCTTTAGGCTTCCACTAACCTGGGGCTTTCAGAAATTCT | |
| | ATTTGGCCTTTCTGTGGGTAGCTTTCCAGCTTCTCTTCTAGGGAGCCCCAGGCATCATTTCCCAAAAGCA | |
| | TCCCCATCTCCTGATTCTCTTGGAACTCCTACAGATAAGCATCCTGGCAGAGGCCCAGGCTCCCAAACCG | |
| | ACAAAGTGAAAAGAGACCAGAGAGGCCAAGCATATTGACTGGTGCTGTTCAGGGCCTGCTCTTTTCCACT | |
| | CACCACTTGTTTTGCTGCTTGTCACGAGGAGAGTTGTTCCTGTATGTGGCTGCTCTCAGATCTTTCCAAG | |
| | CAAGCCAGTCATTTGAAGAGGTTTTCTTTTCATGCTGGAGGGCAGGCTAAGATCAATGAGTGGAAGAGAG | |
| | AAAGGCTGTTTTAGCTCAAGTTAAAGGAACACCTTCTAGCCATCAAAGCCGCCCAACAGAGGCAAGGGCC | |
| | ACCACACATGAGAGAGCGCTCTGTCCTTAAAGGGAATTCTCTGTTGAGTGGGAGGTGAACACCCTGGTTC | |
| | TTCCAACTCAGGAATTCTCGTGGCTGGGCTGGGTCAGTGATGGCTTTGTCTCTTTATGTCTAAAGTGCCC | |
| | TATGGCTGCTGAAGGTTACCTAACCATTCTTTAAAAGGAGAATGACCCTCCATGGGAATGGCCAGCCTGC | |
| | CAACTGTGCAATTGAAGAAGACCCGATGGATCAACCCCATGTCTCCCTTGGGGAGAAAGTGCATAAACCA | |
| | GGGGTCTCTTTTTTTTTTTCAACAAACCATTGAGCTGTTCTTGGAGTTCATCTCTGGAGAGGTTATACAT | |
| | TATTAGAAGTTTGATTATTATTATAGTTTGATCAATTTATTTGTCTTAGAGATCCAATTTTTACTAATTC | |
| | CCTAGTTTTTTATTTCAGCATCTGAATGTCTTTCTCCCTAGCACAGTGCATACAATCAGGGCCTTGGGTA | |
| | TTTCCAGTGATAACTTTCCTTGGAGAGGATCTAAGAAAAGCCCAGATTTCGGTAGCCATCTCCCTCCAAA | |
| | TATGTCTCTTTCTGCTTTCTTAGTGCCCATTATTTCCCCCTCTCCTTTCTTCTGTCACTGCCATCTCCTT | |
| | CTTGGTCTTCCCATTGTTCTTTAACTGGCCGTAATGTGGAATTGATATTTACATTTTGATACGGTTTTTT | |
| | TCTTGGCCTGTGTACGGGATTGCCTCATTTCCTGCTCTGAATTTTAAAATTAGATATTAAAGCTGTCATA | |
| | TGGTTTCCTCACAAAAGTCAACAAAGTCCAAACAAAAATAGTTTGCCGTTTTACTTTCATCCATTGAAAA | |
| | AGGAAATTGTGCCTCTTGCAGCCTAGGCAAAGGACATTTAGTACTATCGATTCTTTCCACCCTCACGATG | |
| | ACTTGCGGTTCTCTCTGTAGAAAAGGGATGGCCTAAGAAATACAACTAAAAAAACAAACAAAAACACCAA | |
| | AAGAAAAAAAAAAGCCATTTAAAGCCAGCCACTAGAGGGAGTCAGTTCAGTTCCGTAAAGGTATGCTCAG | |
| | TGCCCGCTGCCTGCAAGCTGTTGGGGACCCCAGGGAGGGCAAGGCAGCCTGTCCCCGCCCCCAGGGAACT | |
| | AGAACATGACAAGAATTCTCCGCACTGTGCCTACCTGTCCCTTTACCTTACCTCTCTGGCCCAGAGTTCT | |
| | TGGAGGGTTTTTTCTTTATTTTCTTATGTACTCATCTACTTATTCTCAAAGTATTTAGCATTCAACACTC | |
| | TTTTTGCTTTAAAAAGAATGGCCTTACAAAGGGACAGAAAAGAGAAGACACGAGCTTGGTGTATTTTCAT | |
| | CAAGTTATGTGGCAGAGAAATCCAGATATTACCAGGACCTGTCTAAACAAATGTTGTGGGTTTTCTTTTC | |
| | ATTCGGATAGCCACTTTATAGTTGGAATATCAATTCTAATGAGGAGGAAGACATAAATATAAGTGGTAAA | |
| | AAGAAACATGACTTCCCTTAAAACAGGCTGGATAATCTATATCAGCCTTGTGGGTGGAGACTAGTATTTG | |
| | ATCCTTGCCATATAAAACATTTTAATATGGTTTACATGGGAAAATATCGATGGCTTCCTCACAAAATGTA | |
| | TGGGTGACGTGAAGTTGAAGAGCCAATGGCTTGGGTGACACGTGCTGGATCCAAAAAGATCAGGGAGACT | |
| | AGAATAAAACTTGGATGTTAAAAATTCACCAGGAATCCACATAAAGTACTATATTTGGGCTAAAATGAAA | |
| | AACTAAATACAAGGTGGGAGAGAGGCAAGAATTTCAGTTGACTAAGCTCAGTGTGAGTCAAAGTGGGATG | |
| | GAACCATGCAAAAACAAAACCCACAGACATGCAGGCTACGTGAGGAGAAAACAGTGGTGAGGATCACATC | |
| | ACATTGTGTTTGCATTTGCCGGAACCATACTTTAAGAAGAAAACCGATCATCTATAATAACATCAGTTTA | |
| | TCAATGCCCCGTCCTGATGAAGTGTGCAGACTCTCAGAAACAGCAGGAAGGACTTCATGAGAACCCTCAG | |
| | GCTGGAGAAGGCACTAGGGCACAAGGAGAGCTCTCCTAGGACCAGGACCAAGAAGCTACAGGCAGGCACA | |
| | GTTTAGCTCCTGCAGAGACCCAGCTTTTCACAAGTTGGAGCCTTCCAGAGATAGAGGGACTGTGGTAGGT | |
| | GGTGACCCACCCATCACTGGAGGTGGAAGCAGAGGCCGTTTGCCAGGGATGCTGGAGAGGGGATTCAAGC | |
| | ATCTGGCTGGGCAACGTGATGCTCAGGGCCGTCTCCACTCAGGGCTTAGGGGAGTCTGTGAGTAGAAGAG | |
| | CTTTAGGTGATTTGTTTGGTGGGGGAAGGCAAGTACACAGCTATGCACTTTCCGTTTCTGACTTTTGCCA | |
| | CCCTGTCAGCCATGGGGAGCCCACTGTGGGACTGAAACCCTGAGCTGAATGCGGCCTCATGTCTCAGAGA | |
| | AACACTGGCAAGTTGGTCAGAGCCGCCGTCTGCATCGAGGCGTAGCTGAGCGGCAGGATGGGGGGCTGCC | |
| | TGCCCAGGGTCTCTCACCGTGGTGTAAGCAGAGCCATGGCTTGCCTAGGACCCTATAGATACCATCACTC | |
| | TTTCTCAGCTCGACTGGAGTTTCTGCACCTTTGCAGGGGCAAAGTAACTCCCTGCACCCTGAACCACCCC | |
| | CCATTCCTGTTCATTTCAGCAGATAATGATGGAGGGGGGGGGTGTCCATCGTGCTGAGGGTGTGACCGCA | |
| | AGAGGGTGAAAACTTCCAGCCAACTTTCTCAGTCCTTTCTCTTGCGAGAGGGAAGCCACCTGCTATACAA | |
| | ACTAATACCCCCTGCCTTGACCCCTTCCCCACGACTCAGTTGACAGAAGGATATACTTTGTTATAACTTA | |
| | TTATTTTGTTCTCTGTAAATACAAGATGTTTATAGGAAATATGTATTCTGAACTCTATCTGCAGAATGAG | |
| | TCACTACACCAAAATAGTTCTATTATTTAGAATGTGTTAATTTTAAAGGGACCTGATAGGTATTTATTTA | |
| | CATATGCGATCCACATTTGTGTGAAAGCATGTGATCATACTAACCCAGCCTCCTGGAATGTCGCTGTACG | |
| | ATGATTGATGTCTTTTTCTCAGTCCATAGTTACAATTGTTTAGTATGCTAATCAGTCCAGTTCCCTGAGG | |
| | TTTAAGATCAAATATAAATTACTCTGCTTTTCGACTCATTCAGGTAGCATTGTACCTGAACCTGATTGCT | |
| | ACTTTTTCATCTTAAATATTATATTTCCTCATCTAATCTGCCTTCCCCTCATCCACAGACATTTGGAGAA | |
| | GGAAATGGGAGGGTGTCTGTTATCCCTTTCTCTTTGCTTTGTCCCCGTTGTTAGACTGGCAGCGTCAGTT | |
| | GCTCGGTGGGCTTGGTTAGAGCCGTGGGTGAGGCAGGTGGCTGGCGGGGACAGGGAGAGGCTGAGAGGGA | |
| | AGTGGTGGCATTTACTGCTCTGACACTTCCACTGTCCCTGCTGGGGATGCTGGGGCCAAGGCCTGTGGGG | |
| | CCTGTGAACTGCACAGCCAGGAGCAAGGAACCCACTAAATACTCCGTCACCTCCATGTCCCCTCTACAGT | |
| | GTTAAATTATTACATAAGCAGGTGAAAGGTAGAAGGCGAATTATGTGAGTAAATATGGTCTGTTTTCTCT | |
| | TCAGCAAAAATGACTATTTTTGTGTGTGACTAATTTATTTTTATTATTGTAAAGATACAATAAACCGGTT | |
| | GAAATATCTGCTTTGTTGACAAGCGTGTGCTTTCTCTGGCCTTATTCGCGTTCTGTTCTCCTGCAAATAG | |
| | CGCCCTCTAAAAAGAAGAGTCAGACAATAAACTGGTTGAAATATC | |
| KRT18 | TCCGGGGCGGGGGCGGGGCCTCACTCTGCGATATAACTCGGGTCGCGCGGCTCGCGCAGGCCGCCACCGT | 121 |
| NM_000224.2 | CGTCCGCAAAGCCTGAGTCCTGTCCTTTCTCTCTCCCCGGACAGCATGAGCTTCACCACTCGCTCCACCT | |
| | TCTCCACCAACTACCGGTCCCTGGGCTCTGTCCAGGCGCCCAGCTACGGCGCCCGGCCGGTCAGCAGCGC | |
| | GGCCAGCGTCTATGCAGGCGCTGGGGGCTCTGGTTCCCGGATCTCCGTGTCCCGCTCCACCAGCTTCAGG | |
| | GGCGGCATGGGGTCCGGGGGCCTGGCCACCGGGATAGCCGGGGGTCTGGCAGGAATGGGAGGCATCCAGA | |
| | ACGAGAAGGAGACCATGCAAAGCCTGAACGACCGCCTGGCCTCTTACCTGGACAGAGTGAGGAGCCTGGA | |
| | GACCGAGAACCGGAGGCTGGAGAGCAAAATCCGGGAGCACTTGGAGAAGAAGGGACCCCAGGTCAGAGAC | |
| | TGGAGCCATTACTTCAAGATCATCGAGGACCTGAGGGCTCAGATCTTCGCAAATACTGTGGACAATGCCC | |
| | GCATCGTTCTGCAGATTGACAATGCCCGTCTTGCTGCTGATGACTTTAGAGTCAAGTATGAGACAGAGCT | |
| | GGCCATGCGCCAGTCTGTGGAGAACGACATCCATGGGCTCCGCAAGGTCATTGATGACACCAATATCACA | |
| | CGACTGCAGCTGGAGACAGAGATCGAGGCTCTCAAGGAGGAGCTGCTCTTCATGAAGAAGAACCACGAAG | |
| | AGGAAGTAAAAGGCCTACAAGCCCAGATTGCCAGCTCTGGGTTGACCGTGGAGGTAGATGCCCCCAAATC | |
| | TCAGGACCTCGCCAAGATCATGGCAGACATCCGGGCCCAATATGACGAGCTGGCTCGGAAGAACCGAGAG | |
| | GAGCTAGACAAGTACTGGTCTCAGCAGATTGAGGAGAGCACCACAGTGGTCACCACACAGTCTGCTGAGG | |
| | TTGGAGCTGCTGAGACGACGCTCACAGAGCTGAGACGTACAGTCCAGTCCTTGGAGATCGACCTGGACTC | |
| | CATGAGAAATCTGAAGGCCAGCTTGGAGAACAGCCTGAGGGAGGTGGAGGCCCGCTACGCCCTACAGATG | |
| | GAGCAGCTCAACGGGATCCTGCTGCACCTTGAGTCAGAGCTGGCACAGACCCGGGCAGAGGGACAGCGCC | |
| | AGGCCCAGGAGTATGAGGCCCTGCTGAACATCAAGGTCAAGCTGGAGGCTGAGATCGCCACCTACCGCCG | |
| | CCTGCTGGAAGATGGCGAGGACTTTAATCTTGGTGATGCCTTGGACAGCAGCAACTCCATGCAAACCATC | |
| | CAAAAGACCACCACCCGCCGGATAGTGGATGGCAAAGTGGTGTCTGAGACCAATGACACCAAAGTTCTGA | |
| | GGCATTAAGCCAGCAGAAGCAGGGTACCCTTTGGGGAGCAGGAGGCCAATAAAAAGTTCAGAGTTCAAAA | |
| | AAAAAAAAAAAAAAA | |
| MYO5C | AACTCGGGAACGGGAACAGGAGGCCGTTGGAAAACTTTGGGCAAGATGGCCCGGCGGTGATTTCCGCGGC | 122 |
| NM_018728.3 | GGTCTCTCCTGCGCCCGGCCTCTGCGGCGCAGGCCCAGCCCCCGAGCCTCGCACGTTCGGCAGCCCCGGC | |
| | CTGGCCCCGGCCCCTCCTGCCCATGGCGGTGGCCGAGCTGTACACGCAGTACAACAGGGTCTGGATTCCC | |
| | GATCCTGAAGAAGTTTGGAAGTCTGCTGAAATAGCCAAGGACTACAGAGTTGGTGACAAGGTCCTGCGAC | |
| | TCCTGCTGGAGGATGGAACGGAGCTGGATTATTCTGTCAATCCAGAATCTCTGCCTCCACTTCGGAATCC | |
| | TGACATCCTCGTGGGCGAGAATGACCTCACGGCTCTCAGCTATCTTCACGAGCCCGCGGTGCTCCACAAC | |
| | CTCAGAATCCGCTTTGCAGAATCCAAACTCATTTACACCTACAGTGGAATCATTTTGGTGGCCATGAATC | |
| | CTTACAAGCAGTTGCCAATATACGGAGATGCCATCATCCACGCCTACAGCGGGCAGAACATGGGCGATAT | |
| | GGACCCACACATATTTGCCGTGGCAGAAGAGGCATACAAGCAGATGGCCAGAAACAACAGAAACCAGTCC | |
| | ATAATTGTAAGTGGGGAGTCAGGTGCTGGAAAGACAGTGTCGGCTCGCTATGCCATGAGGTACTTTGCCA | |
| | CCGTCAGCAAATCGGGCAGCAACGCTCACGTGGAAGACAAGGTCCTGGCATCCAATCCCATCACCGAGGC | |
| | CGTTGGAAATGCCAAGACCACCCGCAATGACAATAGTAGTCGGTTTGGGAAATACACAGAAATCAGTTTT | |
| | GATGAACAAAATCAAATTATAGGAGCCAACATGAGCACTTACCTCCTGGAGAAATCCAGAGTTGTCTTTC | |
| | AATCGGAAAATGAACGAAATTACCACATTTTCTATCAGCTTTGTGCATCTGCACAGCAGTCGGAATTTAA | |
| | ACATCTTAAATTGGGGAGTGCCGAAGAATTTAATTATACAAGAATGGGAGGCAATACTGTCATTGAGGGT | |
| | GTGAATGATCGAGCTGAAATGGTAGAGACTCAAAAGACCTTCACGCTTCTGGGTTTCAAGGAGGATTTTC | |
| | AGATGGACGTTTTTAAAATCCTGGCAGCCATCCTACATCTGGGCAATGTGCAGATCACCGCGGTGGGCAA | |
| | CGAGAGGTCCTCAGTTAGTGAGGATGACAGTCACCTGAAGGTGTTCTGTGAGCTCCTGGGCCTGGAGAGT | |
| | GGCAGAGTTGCTCAGTGGCTGTGCAATCGCAAAATCGTCACAAGCTCTGAGACGGTGGTAAAACCCATGA | |
| | CCAGGCCTCAGGCTGTCAACGCCAGGGATGCACTGGCCAAAAAGATCTATGCTCACCTGTTCGACTTCAT | |
| | TGTGGAGAGAATTAACCAAGCGTTGCAGTTTTCAGGCAAGCAGCACACTTTTATTGGTGTTTTGGACATT | |
| | TATGGTTTTGAAACCTTTGATGTGAACAGCTTTGAACAATTTTGCATCAATTACGCTAATGAAAAACTGC | |
| | AACAACAGTTTAACATGCATGTCTTCAAACTGGAACAAGAAGAATACATGAAGGAAGATATACCTTGGAC | |
| | GCTGATAGATTTTTATGACAATCAACCAGTTATTGACCTGATTGAAGCAAAAATGGGAATTCTGGAGTTA | |
| | CTGGATGAAGAATGTTTGTTACCACATGGAACTGATGAAAACTGGCTTCAAAAGCTGTATAATAATTTTG | |
| | TCAACAGGAACCCTTTGTTTGAAAAGCCTAGAATGTCAAACACATCCTTTGTCATCCAGCACTTTGCTGA | |
| | TAAGGTAGAGTATAAATGTGAAGGTTTCCTGGAGAAAAACAGAGACACCGTCTATGACATGCTGGTTGAA | |
| | ATCCTGAGAGCAAGCAAGTTTCATCTCTGTGCCAACTTTTTTCAAGAAAATCCAACTCCTCCTTCTCCTT | |
| | TTGGTTCAATGATTACAGTTAAATCTGCAAAGCAAGTCATCAAGCCAAACAGCAAGCATTTCCGGACCAC | |
| | AGTTGGGAGCAAGTTCCGCAGCTCTCTGTACTTGCTCATGGAGACCCTCAATGCGACGACGCCCCACTAC | |
| | GTTCGATGCATCAAGCCAAATGATGAGAAGTTACCCTTTGAATTTGACTCCAAAAGAATTGTTCAGCAGC | |
| | TGCGAGCCTGCGGCGTTTTAGAAACGATTCGCATTAGTGCACAGAGCTACCCTTCCAGGTGGACATACAT | |
| | CGAGTTCTACAGTCGCTACGGCATTCTCATGACCAAGCAAGAGCTTTCCTTCAGCGATAAAAAGGAGGTG | |
| | TGCAAGGTGGTTTTACACAGACTCATCCAGGATTCTAATCAGTACCAGTTTGGTAAAACCAAAATTTTCT | |
| | TCAGAGCAGGACAAGTGGCTTATTTAGAGAAACTTCGATTGGATAAACTGAGGCAGAGTTGTGTTATGGT | |
| | ACAAAAGCACATGCGTGGCTGGCTCCAGAGGAAAAAATTCCTCCGAGAGAGACGAGCCGCCCTGATAATC | |
| | CAGCAGTACTTCCGGGGTCAGCAAACTGTGAGGAAAGCTATTACTGCAGTGGCCTTAAAAGAAGCTTGGG | |
| | CAGCCATAATCATTCAGAAGCACTGCCGCGGGTATCTTGTTCGCAGCCTGTATCAGTTGATTCGCATGGC | |
| | CACCATCACAATGCAGGCCTACAGCCGAGGATTCCTGGCAAGGAGGAGGTATCGAAAGATGCTGGAGGAA | |
| | CATAAGGCTGTGATCCTACAGAAATACGCACGGGCGTGGCTGGCCAGACGCAGATTCCAGAGTATCCGAC | |
| | GATTCGTGCTTAATATTCAGCTTACTTACAGGGTCCAGCGTTTGCAGAAAAAGTTGGAAGATCAGAACAA | |
| | AGAAAACCATGGGCTGGTGGAGAAGCTGACTAGCCTGGCTGCTCTTCGAGCTGGGGATGTGGAAAAGATT | |
| | CAGAAGCTGGAAGCAGAACTAGAAAAAGCAGCCACTCACAGGCGAAATTACGAGGAGAAGGGGAAGAGAT | |
| | ACAGGGATGCTGTGGAAGAGAAATTGGCAAAGCTTCAGAAGCATAATTCAGAACTGGAAACACAGAAAGA | |
| | ACAAATACAGCTGAAGCTTCAAGAGAAGACTGAAGAGTTAAAAGAAAAAATGGACAACCTCACCAAGCAG | |
| | CTCTTTGATGATGTACAAAAGGAAGAACGGCAAAGAATGCTTCTTGAAAAAAGTTTTGAACTGAAAACAC | |
| | AAGACTATGAGAAGCAGATTCAGTCTTTGAAAGAAGAAATTAAAGCTCTCAAGGATGAGAAGATGCAACT | |
| | CCAACACCTGGTGGAGGGGGAGCACGTCACTTCTGATGGCTTGAAGGCGGAAGTGGCCCGCCTGAGCAAG | |
| | CAGGTCAAGACAATCTCTGAGTTCGAAAAAGAGATAGAACTACTTCAGGCACAGAAGATAGATGTGGAGA | |
| | AACATGTGCAGTCACAAAAACGGGAAATGAGAGAAAAGATGTCAGAGATCACCAAACAACTTCTCGAAAG | |
| | CTATGACATTGAAGATGTAAGAAGCAGGCTCTCTGTGGAAGATCTGGAACATTTAAATGAGGATGGAGAA | |
| | CTTTGGTTTGCTTATGAAGGACTAAAGAAAGCAACACGTGTTTTGGAGAGCCATTTCCAGTCTCAGAAGG | |
| | ATTGCTATGAAAAGGAGATTGAAGCTTTGAACTTCAAAGTGGTGCATCTCAGTCAAGAAATCAACCACCT | |
| | GCAGAAGTTATTCAGAGAAGAAAATGACATCAATGAAAGCATCCGTCATGAAGTTACCAGGCTAACATCA | |
| | GAGAACATGATGATCCCAGACTTTAAACAGCAAATTTCAGAATTGGAGAAACAGAAGCAAGATCTTGAAA | |
| | TCCGCCTGAATGAACAAGCTGAGAAAATGAAAGGAAAACTAGAAGAATTGTCTAATCAGTTACATCGCAG | |
| | TCAAGAGGAGGAAGGAACACAAAGAAAGGCCTTGGAAGCCCAAAATGAAATACATACCAAAGAGAAGGAG | |
| | AAGCTGATTGATAAGATTCAAGAAATGCAGGAGGCCAGTGACCACTTGAAGAAACAATTTGAAACTGAAA | |
| | GTGAAGTCAAGTGTAACTTCCGGCAGGAAGCATCCCGGCTCACTTTGGAAAACAGGGATCTTGAAGAAGA | |
| | ATTAGACATGAAAGACAGAGTGATTAAAAAGCTACAAGATCAAGTCAAGACACTAAGCAAGACAATTGGA | |
| | AAAGCCAATGATGTGCACTCGTCCTCAGGACCCAAGGAGTACCTTGGAATGCTGCAATACAAGAGAGAAG | |
| | ACGAGGCCAAGCTCATTCAGAACCTCATTCTTGACTTGAAGCCCCGTGGCGTGGTGGTGAACATGATCCC | |
| | CGGGCTGCCGGCTCATATCCTGTTCATGTGTGTGCGCTACGCAGACTCTCTGAATGATGCCAACATGCTG | |
| | AAGTCCCTCATGAACAGCACCATTAATGGCATCAAGCAGGTGGTTAAGGAACATTTAGAAGACTTTGAAA | |
| | TGCTGTCCTTTTGGCTTTCCAACACTTGTCATTTTCTCAATTGCCTGAAGCAGTACAGCGGAGAAGAGGA | |
| | ATTCATGAAGCATAATAGTCCACAGCAGAATAAGAATTGCTTGAACAATTTTGACCTTTCAGAATACAGA | |
| | CAGATTCTCAGTGATGTGGCTATACGAATATATCATCAATTTATTATCATAATGGAAAAGAATATCCAAC | |
| | CGATAATAGTTCCGGGAATGCTGGAGTATGAGAGCCTGCAGGGCATTTCCGGCCTGAAGCCCACAGGCTT | |
| | CCGGAAGCGCTCCTCTAGCATAGACGACACGGACGGCTACACCATGACCTCCGTCCTGCAACAGCTGAGC | |
| | TACTTTTACACCACCATGTGCCAGAACGGCCTGGACCCCGAGCTTGTGAGGCAGGCGGTGAAGCAGCTCT | |
| | TCTTCTTGATCGGGGCGGTCACGCTGAACAGCCTCTTCCTGCGCAAGGACATGTGCTCCTGCAGAAAAGG | |
| | GATGCAGATCAGGTGCAATATCAGCTACTTAGAAGAATGGCTTAAAGATAAGAACTTGCAGAACAGCTTA | |
| | GCAAAGGAAACTTTGGAGCCCCTCTCTCAGGCAGCCTGGTTGCTTCAGGTCAAGAAGACCACAGACAGTG | |
| | ATGCCAAGGAGATCTACGAACGCTGCACCTCACTGTCTGCTGTGCAGATCATAAAGATCCTTAATTCATA | |
| | CACACCTATAGATGACTTTGAGAAGAGAGTGACTCCATCCTTTGTTCGCAAAGTACAGGCTCTCCTAAAT | |
| | AGCCGGGAGGATTCATCACAGCTGATGTTGGATACCAAATATCTCTTTCAAGTCACATTTCCTTTTACCC | |
| | CCTCTCCACATGCTCTGGAAATGATTCAGATCCCCAGCAGTTTCAAGCTAGGCTTTCTGAATAGGTTATA | |
| | GCAGGAGAAAAAGTCAATGCACTTTTTCTTCAAAAGCTAAGTGAAGGTTCAATATGAGGGATGTGTTTTA | |
| | TTAATTGGCAGTGGAAATTGGAATGTGATTTAAGGAAGAAAACAGACTTTTCTCAAATGGACCACATCAT | |
| | CTCTCACTCACAGTGACAATGCTGCTCCTGTAATTTTGTAAGAATTCACACACACCAGCTGTATTTGGAA | |
| | AAGCCATGTCTCACTCTCGAATCTCAGCTGGTTTTCACTGAAATTCCTGGAGGGCTCATATTTTCTTCCA | |
| | CGTGCCTCTTGATCTGTTCTGTCTTGTGGCAGGGCTCTACCAGGAGGGAGTGAGATCTGGGGACACAGTG | |
| | GCTTCCAAGTTTTCTAAGGTTCATGTGAAACCTGAGTACATTTACAAAGCTGCAAGTGGATTCTAGTGCT | |
| | GAGTCTTCCAGGAAAAAATCCCGTTTGGCCACCGTGACCTGCCAAAAGTTCTCTTGCCCCATGCCTGCTG | |
| | GGGACAGAAGGTTTTCATGAACTCTTTTTACTGAAAATGCCCTGCATTTAAAAATGTTTATTTTAGACCC | |
| | TTCTAAATTTTTTTTTTTTTTTTTTTTTGAGACTCCGGAGTCTCGCTCTATCGCCAGGCTGGAGTGTAGT | |
| | GGCATGATCTCGGCTTATTGCAACCTCCGCTTCCTGGGTTCAAACAATTCTCCTGCCTCAGCCTCCTGAG | |
| | TAGCTGGGACTACAGGCACCTGCCACCACGCCCAGCTAATTTTTGTATTTTTAGTGGAGACAGGTTTCAC | |
| | CATGTTGGCCAGGATGGCCTCGATCTCTTGACCTCGTGATCCGCCCACCTCAGCCTCCCAAAGTGCTAGG | |
| | ATTACAGGCGTGTGCCACCGCGCCCGGCTGACCCTTTTAATTTTTAAGAGTGTTCAATCCGAGATGAATC | |
| | ATTTGAAGTATTTTTATATGTATATCTATTTAAAACTAATATATTATTAAAGCTTAATTGCCATGCCGTT | |
| | TATCTTCTCTGAAAGAACTTCAAATCTTACCTGCCAACATATTCACCATAATTTTTTTATTTTTTAATAC | |
| | CTTTCATACAATAACTTTTTTAAAACAACCTCAGATTGAAAAAGCAACCTAAATTACTTTCGCTCTCTAA | |
| | TCAGCATTTCAATGTATTTATTTTTAAATTTTCTCAAAAAGTAACTAAAAAATTGTGTCGGACCCTACTT | |
| | TTGAGAAATCTACGTTTCCCAAGTTTTATGGGAACTGGCTATTCCTTGTCCCGGCACACCTTCTCATTCC | |
| | TTCCTTTCAGAGCCTAAAACCTCATTTGATAAGCACTCCTAGTCTCTGGCCTGTGGATCCAGTGCTATTC | |
| | TGTCACCAACCTAAGAATCCCAATTGCACCTTCTGTTTCTGACAGTCACAGGTGACAGCTGTGATTCTAT | |
| | AATACAGACTGGTGTCTTAGAGGTAGGAATAATACATGATTATGAAGCATCACCCTGCTAATACATAATA | |
| | ATGTCTTTTTATATTATAAGTGATTGAGTTTAGTTCATTTCAATACATTGTACATGAAAAAATGAAAAGT | |
| | AGAACTTTGTAATACTTTAATCAATAAAATTAATTACCAAATGAA | |
| FBP1 | GAAGATCCAAGCAGGCGGAGCCGCGGTCTGGTCCGCGGGGTAGGCGGGGCGCAAGAGTGTTCCCGGGGGC | 123 |
| NM_000507.3 | GGGGGGCCGACCCGCGTCTAAAGGTTTCCGCGATTCACCCGCCGGCGCCTGGCCTGGCCCAGTTGCACCA | |
| | CGAGCGCTGCGGACACTCGGGGCGGCAGTCGGTCTGTCAGTCCTCCCGCCAGGTCCCGCGGCCCGCACCT | |
| | GCCGCCCGCACCTGCAGCTCCGCACCTGCGGCCAGTGCCTACTGCCCTCTCTTGCCGCCCGCACCTGCAG | |
| | CCCCGCACCTGCCGCTTGCACCTGCAGCCCCGCGCTCTACCCGGTTCAAGCATGGCTGACCAGGCGCCCT | |
| | TCGACACGGACGTCAACACCCTGACCCGCTTCGTCATGGAGGAGGGCAGGAAGGCCCGCGGCACGGGCGA | |
| | GTTGACCCAGCTGCTCAACTCGCTCTGCACAGCAGTCAAAGCCATCTCTTCGGCGGTGCGCAAGGCGGGC | |
| | ATCGCGCACCTCTATGGCATTGCTGGTTCTACCAACGTGACAGGTGATCAAGTTAAGAAGCTGGACGTCC | |
| | TCTCCAACGACCTGGTTATGAACATGTTAAAGTCATCCTTTGCCACGTGTGTTCTCGTGTCAGAAGAAGA | |
| | TAAACACGCCATCATAGTGGAACCGGAGAAAAGGGGTAAATATGTGGTCTGTTTTGATCCCCTTGATGGA | |
| | TCTTCCAACATCGATTGCCTTGTGTCCGTTGGAACCATTTTTGGCATCTATAGAAAGAAATCAACTGATG | |
| | AGCCTTCTGAGAAGGATGCTCTGCAACCAGGCCGGAACCTGGTGGCAGCCGGCTACGCACTGTATGGCAG | |
| | TGCCACCATGCTGGTCCTTGCCATGGACTGTGGGGTCAACTGCTTCATGCTGGACCCGGCCATCGGGGAG | |
| | TTCATTTTGGTGGACAAGGATGTGAAGATAAAAAAGAAAGGTAAAATCTACAGCCTTAACGAGGGCTACG | |
| | CCAGGGACTTTGACCCTGCCGTCACTGAGTACATCCAGAGGAAGAAGTTCCCCCCAGATAATTCAGCTCC | |
| | TTATGGGGCCCGGTATGTGGGCTCCATGGTGGCTGATGTTCATCGCACTCTGGTCTACGGAGGGATATTT | |
| | CTGTACCCCGCTAACAAGAAGAGCCCCAATGGAAAGCTGAGACTGCTGTACGAATGCAACCCCATGGCCT | |
| | ACGTCATGGAGAAGGCTGGGGGAATGGCCACCACTGGGAAGGAGGCCGTGTTAGACGTCATTCCCACAGA | |
| | CATTCACCAGAGGGCGCCGGTGATCTTGGGATCCCCCGACGACGTGCTCGAGTTCCTGAAGGTGTATGAG | |
| | AAGCACTCTGCCCAGTGAGCACCTGCCCTGCCTGCATCCGGAGAATTGCCTCTACCTGGACCTTTTGTCT | |
| | CACACAGCAGTACCCTGACCTGCTGTGCACCTTACATTCCTAGAGAGCAGAAATAAAAAGCATGACTATT | |
| | TCCACCATCAAATGCTGTAGAATGCTTGGCACTCCCTAACCAAATGCTGTCTCCATAATGCCACTGGTGT | |
| | TAAGATATATTTTGAGTGGATGGAGGAGAAATAAACTTATTCCTCCTTAAAAAAAAAAAAAAAAAAAAAA | |
| | AAAAAAAAAAAAAAAAAAAAAAAAAAAAAAAAAAAAA | |
| CDC45L | CGCGAGCGCCAGGCGTCCGGCCGCCGTGGCTATGTTCGTGTCCGATTTCCGCAAAGAGTTCTACGAGGTG | 124 |
| AF081535.1 | GTCCAGAGCCAGAGGGTCCTTCTCTTCGTGGCCTCGGACGTGGATGCTCTGTGTGCGTGCAAGATCCTTC | |
| | AGGCCTTGTTCCAGTGTGACCACGTGCAATATACGCTGGTTCCAGTTTCTGGGTGGCAAGAACTTGAAAC | |
| | TGCATTTCTTGAGCATAAAGAACAGTTTCATTATTTTATTCTCATAAACTGTGGAGCTAATGTAGACCTA | |
| | TTGGATATTCTTCAACCTGATGAAGACACTATATTCTTTGTGTGTGACACCCATAGGCCAGTCAATGTCG | |
| | TCAATGTATACAACGATACCCAGATCAAATTACTCATTAAACAAGATGATGACCTTGAAGTTCCCGCCTA | |
| | TGAAGACATCTTCAGGGATGAAGAGGAGGATGAAGAGCATTCAGGAAATGACAGTGATGGGTCAGAGCCT | |
| | TCTGAGAAGCGCACACGGTTAGAAGAGGAGATAGTGGAGCAAACCATGCGGAGGAGGCAGCGGCGAGAGT | |
| | GGGAGGCCCGGAGAAGAGACATCCTCTTTGACTACGAGCAGTATGAATATCATGGGACATCGTCAGCCAT | |
| | GGTGATGTTTGAGCTGGCTTGGATGCTGTCCAAGGACCTGAATGACATGCTGTGGTGGGCCATCGTTGGA | |
| | CTAACAGACCAGTGGGTGCAAGACAAGATCACTCAAATGAAATACGTGACTGATGTTGGTGTCCTGCAGC | |
| | GCCACGTTTCCCGCCACAACCACCGGAACGAGGATGAGGAGAACACACTCTCCGTGGACTGCACACGGAT | |
| | CTCCTTTGAGTATGACCTCCGCCTGGTGCTCTACCAGCACTGGTCCCTCCATGACAGCCTGTGCAACACC | |
| | AGCTATACCGCAGCCAGGTTCAAGCTGTGGTCTGTGCATGGACAGAAGCGGCTCCAGGAGTTCCTTGCAG | |
| | ACATGGGTCTTCCCCTGAAGCAGGTGAAGCAGAAGTTCCAGGCCATGGACATCTCCTTGAAGGAGAATTT | |
| | GCGGGAAATGATTGAAGAGTCTGCAAATAAATTTGGGATGAAGGACATGCGCGTGCAGACTTTCAGCATT | |
| | CATTTTGGGTTCAAGCACAAGTTTCTGGCCAGCGACGTGGTCTTTGCCACCATGTCTTTGATGGAGAGCC | |
| | CCGAGAAGGATGGCTCAGGGACAGATCACTTCATCCAGGCTCTGGACAGCCTCTCCAGGAGTAACCTGGA | |
| | CAAGCTGTACCATGGCCTGGAACTCGCCAAGAAGCAGCTGCGAGCCACCCAGCAGACCATTGCCAGCTGC | |
| | CTTTGCACCAACCTCGTCATCTCCCAGGGGCCTTTCCTGTACTGCTCTCTCATGGAGGGCACTCCAGATG | |
| | TCATGCTGTTCTCTAGGCCGGCATCCCTAAGCCTGCTCAGCAAACACCTGCTCAAGTCCTTTGTGTGTTC | |
| | GACAAAGAACCGGCGCTGCAAACTGCTGCCCCTGGTGATGGCTGCCCCCCTGAGCATGGAGCATGGCACA | |
| | GTGACCGTGGTGGGCATCCCCCCAGAGACCGACAGCTCGGACAGGAAGAACTTTTTTGGGAGGGCGTTTG | |
| | AGAAGGCAGCGGAAAGCACCAGCTCCCGGATGCTGCACAACCATTTTGACCTCTCAGTAATTGAGCTGAA | |
| | AGCTGAGGATCGGAGCAAGTTTCTGGACGCACTTATTTCCCTCCTGTCCTAGGAATTTGATTCTTCCAGA | |
| | ATGACCTTCTTATTTATGTAACTGGCTTTCATTTAGATTGTAAGTTATGGACATGATTTGAGATGTAGAA | |
| | GCCATTTTTTATTAAATAAAATGCTTATTTTAGGCTCCGTCCCCAAAAAAAAAAAAAAAAAAAAAAAAAA | |
| | AAA | |
| CXXC5 | ACTGCTGGCGGCTGGAGCGGAGCGCACCGCGGCGGTGGTGCCCAGAGCGGAGCGCAGCTCCCTGCCCCGC | 125 |
| NM_016463.7 | CCCTCCCCCTCGGCCTCGCGGCGACGGCGGCGGTGGCGGCTTGGACGACTCGGAGAGCCGAGTGAAGACA | |
| | TTTCCACCTGGACACCTGACCATGTGCCTGCCCTGAGCAGCGAGGCCCACCAGGCATCTCTGTTGTGGGC | |
| | AGCAGGGCCAGGTCCTGGTCTGTGGACCCTCGGCAGTTGGCAGGCTCCCTCTGCAGTGGGGTCTGGGCCT | |
| | CGGCCCCACCATGTCGAGCCTCGGCGGTGGCTCCCAGGATGCCGGCGGCAGTAGCAGCAGCAGCACCAAT | |
| | GGCAGCGGTGGCAGTGGCAGCAGTGGCCCAAAGGCAGGAGCAGCAGACAAGAGTGCAGTGGTGGCTGCCG | |
| | CCGCACCAGCCTCAGTGGCAGATGACACACCACCCCCCGAGCGTCGGAACAAGAGCGGTATCATCAGTGA | |
| | GCCCCTCAACAAGAGCCTGCGCCGCTCCCGCCCGCTCTCCCACTACTCTTCTTTTGGCAGCAGTGGTGGT | |
| | AGTGGCGGTGGCAGCATGATGGGCGGAGAGTCTGCTGACAAGGCCACTGCGGCTGCAGCCGCTGCCTCCC | |
| | TGTTGGCCAATGGGCATGACCTGGCGGCGGCCATGGCGGTGGACAAAAGCAACCCTACCTCAAAGCACAA | |
| | AAGTGGTGCTGTGGCCAGCCTGCTGAGCAAGGCAGAGCGGGCCACGGAGCTGGCAGCCGAGGGACAGCTG | |
| | ACGCTGCAGCAGTTTGCGCAGTCCACAGAGATGCTGAAGCGCGTGGTGCAGGAGCATCTCCCGCTGATGA | |
| | GCGAGGCGGGTGCTGGCCTGCCTGACATGGAGGCTGTGGCAGGTGCCGAAGCCCTCAATGGCCAGTCCGA | |
| | CTTCCCCTACCTGGGCGCTTTCCCCATCAACCCAGGCCTCTTCATTATGACCCCGGCAGGTGTGTTCCTG | |
| | GCCGAGAGCGCGCTGCACATGGCGGGCCTGGCTGAGTACCCCATGCAGGGAGAGCTGGCCTCTGCCATCA | |
| | GCTCCGGCAAGAAGAAGCGGAAACGCTGCGGCATGTGCGCGCCCTGCCGGCGGCGCATCAACTGCGAGCA | |
| | GTGCAGCAGTTGTAGGAATCGAAAGACTGGCCATCAGATTTGCAAATTCAGAAAATGTGAGGAACTCAAA | |
| | AAGAAGCCTTCCGCTGCTCTGGAGAAGGTGATGCTTCCGACGGGAGCCGCCTTCCGGTGGTTTCAGTGAC | |
| | GGCGGCGGAACCCAAAGCTGCCCTCTCCGTGCAATGTCACTGCTCGTGTGGTCTCCAGCAAGGGATTCGG | |
| | GCGAAGACAAACGGATGCACCCGTCTTTAGAACCAAAAATATTCTCTCACAGATTTCATTCCTGTTTTTA | |
| | TATATATATTTTTTGTTGTCGTTTTAACATCTCCACGTCCCTAGCAT | |
| FANCA | CGGGCGCAGGGAGCCGCCGCCGGGGCTGTAGGCGCCAAGGCCATGTCCGACTCGTGGGTCCCGAACTCCG | 126 |
| NM_000135.2 | CCTCGGGCCAGGACCCAGGGGGCCGCCGGAGGGCCTGGGCCGAGCTGCTGGCGGGAAGGGTCAAGAGGGA | |
| | AAAATATAATCCTGAAAGGGCACAGAAATTAAAGGAATCAGCTGTGCGCCTCCTGCGAAGCCATCAGGAC | |
| | CTGAATGCCCTTTTGCTTGAGGTAGAAGGTCCACTGTGTAAAAAATTGTCTCTCAGCAAAGTGATTGACT | |
| | GTGACAGTTCTGAGGCCTATGCTAATCATTCTAGTTCATTTATAGGCTCTGCTTTGCAGGATCAAGCCTC | |
| | AAGGCTGGGGGTTCCCGTGGGTATTCTCTCAGCCGGGATGGTTGCCTCTAGCGTGGGACAGATCTGCACG | |
| | GCTCCAGCGGAGACCAGTCACCCTGTGCTGCTGACTGTGGAGCAGAGAAAGAAGCTGTCTTCCCTGTTAG | |
| | AGTTTGCTCAGTATTTATTGGCACACAGTATGTTCTCCCGTCTTTCCTTCTGTCAAGAATTATGGAAAAT | |
| | ACAGAGTTCTTTGTTGCTTGAAGCGGTGTGGCATCTTCACGTACAAGGCATTGTGAGCCTGCAAGAGCTG | |
| | CTGGAAAGCCATCCCGACATGCATGCTGTGGGATCGTGGCTCTTCAGGAATCTGTGCTGCCTTTGTGAAC | |
| | AGATGGAAGCATCCTGCCAGCATGCTGACGTCGCCAGGGCCATGCTTTCTGATTTTGTTCAAATGTTTGT | |
| | TTTGAGGGGATTTCAGAAAAACTCAGATCTGAGAAGAACTGTGGAGCCTGAAAAAATGCCGCAGGTCACG | |
| | GTTGATGTACTGCAGAGAATGCTGATTTTTGCACTTGACGCTTTGGCTGCTGGAGTACAGGAGGAGTCCT | |
| | CCACTCACAAGATCGTGAGGTGCTGGTTCGGAGTGTTCAGTGGACACACGCTTGGCAGTGTAATTTCCAC | |
| | AGATCCTCTGAAGAGGTTCTTCAGTCATACCCTGACTCAGATACTCACTCACAGCCCTGTGCTGAAAGCA | |
| | TCTGATGCTGTTCAGATGCAGAGAGAGTGGAGCTTTGCGCGGACACACCCTCTGCTCACCTCACTGTACC | |
| | GCAGGCTCTTTGTGATGCTGAGTGCAGAGGAGTTGGTTGGCCATTTGCAAGAAGTTCTGGAAACGCAGGA | |
| | GGTTCACTGGCAGAGAGTGCTCTCCTTTGTGTCTGCCCTGGTTGTCTGCTTTCCAGAAGCGCAGCAGCTG | |
| | CTTGAAGACTGGGTGGCGCGTTTGATGGCCCAGGCATTCGAGAGCTGCCAGCTGGACAGCATGGTCACTG | |
| | CGTTCCTGGTTGTGCGCCAGGCAGCACTGGAGGGCCCCTCTGCGTTCCTGTCATATGCAGACTGGTTCAA | |
| | GGCCTCCTTTGGGAGCACACGAGGCTACCATGGCTGCAGCAAGAAGGCCCTGGTCTTCCTGTTTACGTTC | |
| | TTGTCAGAACTCGTGCCTTTTGAGTCTCCCCGGTACCTGCAGGTGCACATTCTCCACCCACCCCTGGTTC | |
| | CCGGCAAGTACCGCTCCCTCCTCACAGACTACATCTCATTGGCCAAGACACGGCTGGCCGACCTCAAGGT | |
| | TTCTATAGAAAACATGGGACTCTACGAGGATTTGTCATCAGCTGGGGACATTACTGAGCCCCACAGCCAA | |
| | GCTCTTCAGGATGTTGAAAAGGCCATCATGGTGTTTGAGCATACGGGGAACATCCCAGTCACCGTCATGG | |
| | AGGCCAGCATATTCAGGAGGCCTTACTACGTGTCCCACTTCCTCCCCGCCCTGCTCACACCTCGAGTGCT | |
| | CCCCAAAGTCCCTGACTCCCGTGTGGCGTTTATAGAGTCTCTGAAGAGAGCAGATAAAATCCCCCCATCT | |
| | CTGTACTCCACCTACTGCCAGGCCTGCTCTGCTGCTGAAGAGAAGCCAGAAGATGCAGCCCTGGGAGTGA | |
| | GGGCAGAACCCAACTCTGCTGAGGAGCCCCTGGGACAGCTCACAGCTGCACTGGGAGAGCTGAGAGCCTC | |
| | CATGACAGACCCCAGCCAGCGTGATGTTATATCGGCACAGGTGGCAGTGATTTCTGAAAGACTGAGGGCT | |
| | GTCCTGGGCCACAATGAGGATGACAGCAGCGTTGAGATATCAAAGATTCAGCTCAGCATCAACACGCCGA | |
| | GACTGGAGCCACGGGAACACATGGCTGTGGACCTCCTGCTGACGTCTTTCTGTCAGAACCTGATGGCTGC | |
| | CTCCAGTGTCGCTCCCCCGGAGAGGCAGGGTCCCTGGGCTGCCCTCTTCGTGAGGACCATGTGTGGACGT | |
| | GTGCTCCCTGCAGTGCTCACCCGGCTCTGCCAGCTGCTCCGTCACCAGGGCCCGAGCCTGAGTGCCCCAC | |
| | ATGTGCTGGGGTTGGCTGCCCTGGCCGTGCACCTGGGTGAGTCCAGGTCTGCGCTCCCAGAGGTGGATGT | |
| | GGGTCCTCCTGCACCTGGTGCTGGCCTTCCTGTCCCTGCGCTCTTTGACAGCCTCCTGACCTGTAGGACG | |
| | AGGGATTCCTTGTTCTTCTGCCTGAAATTTTGTACAGCAGCAATTTCTTACTCTCTCTGCAAGTTTTCTT | |
| | CCCAGTCACGAGATACTTTGTGCAGCTGCTTATCTCCAGGCCTTATTAAAAAGTTTCAGTTCCTCATGTT | |
| | CAGATTGTTCTCAGAGGCCCGACAGCCTCTTTCTGAGGAGGACGTAGCCAGCCTTTCCTGGAGACCCTTG | |
| | CACCTTCCTTCTGCAGACTGGCAGAGAGCTGCCCTCTCTCTCTGGACACACAGAACCTTCCGAGAGGTGT | |
| | TGAAAGAGGAAGATGTTCACTTAACTTACCAAGACTGGTTACACCTGGAGCTGGAAATTCAACCTGAAGC | |
| | TGATGCTCTTTCAGATACTGAACGGCAGGACTTCCACCAGTGGGCGATCCATGAGCACTTTCTCCCTGAG | |
| | TCCTCGGCTTCAGGGGGCTGTGACGGAGACCTGCAGGCTGCGTGTACCATTCTTGTCAACGCACTGATGG | |
| | ATTTCCACCAAAGCTCAAGGAGTTATGACCACTCAGAAAATTCTGATTTGGTCTTTGGTGGCCGCACAGG | |
| | AAATGAGGATATTATTTCCAGATTGCAGGAGATGGTAGCTGACCTGGAGCTGCAGCAAGACCTCATAGTG | |
| | CCTCTCGGCCACACCCCTTCCCAGGAGCACTTCCTCTTTGAGATTTTCCGCAGACGGCTCCAGGCTCTGA | |
| | CAAGCGGGTGGAGCGTGGCTGCCAGCCTTCAGAGACAGAGGGAGCTGCTAATGTACAAACGGATCCTCCT | |
| | CCGCCTGCCTTCGTCTGTCCTCTGCGGCAGCAGCTTCCAGGCAGAACAGCCCATCACTGCCAGATGCGAG | |
| | CAGTTCTTCCACTTGGTCAACTCTGAGATGAGAAACTTCTGCTCCCACGGAGGTGCCCTGACACAGGACA | |
| | TCACTGCCCACTTCTTCAGGGGCCTCCTGAACGCCTGTCTGCGGAGCAGAGACCCCTCCCTGATGGTCGA | |
| | CTTCATACTGGCCAAGTGCCAGACGAAATGCCCCTTAATTTTGACCTCTGCTCTGGTGTGGTGGCCGAGC | |
| | CTGGAGCCTGTGCTGCTCTGCCGGTGGAGGAGACACTGCCAGAGCCCGCTGCCCCGGGAACTGCAGAAGC | |
| | TACAAGAAGGCCGGCAGTTTGCCAGCGATTTCCTCTCCCCTGAGGCTGCCTCCCCAGCACCCAACCCGGA | |
| | CTGGCTCTCAGCTGCTGCACTGCACTTTGCGATTCAACAAGTCAGGGAAGAAAACATCAGGAAGCAGCTA | |
| | AAGAAGCTGGACTGCGAGAGAGAGGAGCTATTGGTTTTCCTTTTCTTCTTCTCCTTGATGGGCCTGCTGT | |
| | CGTCACATCTGACCTCAAATAGCACCACAGACCTGCCAAAGGCTTTCCACGTTTGTGCAGCAATCCTCGA | |
| | GTGTTTAGAGAAGAGGAAGATATCCTGGCTGGCACTCTTTCAGTTGACAGAGAGTGACCTCAGGCTGGGG | |
| | CGGCTCCTCCTCCGTGTGGCCCCGGATCAGCACACCAGGCTGCTGCCTTTCGCTTTTTACAGTCTTCTCT | |
| | CCTACTTCCATGAAGACGCGGCCATCAGGGAAGAGGCCTTCCTGCATGTTGCTGTGGACATGTACTTGAA | |
| | GCTGGTCCAGCTCTTCGTGGCTGGGGATACAAGCACAGTTTCACCTCCAGCTGGCAGGAGCCTGGAGCTC | |
| | AAGGGTCAGGGCAACCCCGTGGAACTGATAACAAAAGCTCGTCTTTTTCTGCTGCAGTTAATACCTCGGT | |
| | GCCCGAAAAAGAGCTTCTCACACGTGGCAGAGCTGCTGGCTGATCGTGGGGACTGCGACCCAGAGGTGAG | |
| | CGCCGCCCTCCAGAGCAGACAGCAGGCTGCCCCTGACGCTGACCTGTCCCAGGAGCCTCATCTCTTCTGA | |
| | CGGGACCTGCCACTGCACACCAGCCCAGCTCCCGTGTAAATAATTTATTACAAGCATAACATGGAGCTCT | |
| | TGTTGCACTAAAAAGTGGATTACAAATCTCCTCGACTGCTTTAGTGGGGAAAGGAATCAATTATTTATGA | |
| | ACTGTCCGGCCCCGAGTCACTCAGCGTTTGCGGGAAAATAAACCACTGGTCCCAGAGCAGAGGAAGGCTA | |
| | CTTGAGCCGGACACCAAGCCCGCCTCCAGCACCAAGGGCGGGCAGCACCCTCCGACCCTCCCATGCGGGT | |
| | GCACACGAAGGGTGAGGCTGACACAGCCACTGCGGAGTCCAGGCTGCTAGAGGTGCTCATCCTCACTGCC | |
| | GTCCTCAGGTGGGTTCGGGCTTCACCGCCTGGCCCTCTGTGGTCACAGAGGGGCTCGGTGGCCCAGGTGG | |
| | TGGTTCCGCCTCCAGGGGCAGGGCCTTGTCCTGGGTCTGTGTCAGCGGGTGCACCATGGACATGTGTACA | |
| | TTGAGGTTGTGGGCCTTCTCAAACCGCCGGCCACACTGGTCACAGGCAAAGTCCAGCTCAGTCTCAGCCT | |
| | TGTGTTTGGTCATGTGGTACTTGAGGGATGCCCGCTGCCTGCACTGGAACCCACAGACCTCACACCTGGG | |
| | GGACAGAGGCAGATAAGAAGGTGCGAGGGCCACAGCCCTGGGAGGGGGTCCTGACTCACACTTACTGCAA | |
| | AGGCTTGGCTCCCGAATGTCGCATTTGGTGGACGAGAAGGTGCTTCCGCTGCTTGAAGGTTTGTCCACAT | |
| | TCGTCACAGATATAGTTCCGCACCTCTGAGAGGGGAGAGTCCAGTGAGTCCAGGCCCCTGATGCTCCAAC | |
| | CTCCCGGGGGGACGACGATGACAATGTGAAACCATCACAGCTGGGAAGACATTTCTGCACATGGTTCACC | |
| | ATGCAGTGGGCCCAAGCAAGGGGCCTATGAGGGCCTCGTTTATTAAGATCTTTAAACTGCTTTATACACT | |
| | GTCACGTGGCTTCATCAGCTGTGTGCATTTCAGGATGGTTTTTAAAGAAACCTCAGAAAGCTATTTCCTT | |
| MYB | AATATCAACCTGTTTCCTCCTCCTCCTTCTCCTCCTCCTCCGTGACCTCCTCCTCCTCTTTCTCCTGAGA | 127 |
| NM_005375.2 | AACTTCGCCCCAGCGGTGCGGAGCGCCGCTGCGCAGCCGGGGAGGGACGCAGGCAGGCGGCGGGCAGCGG | |
| | GAGGCGGCAGCCCGGTGCGGTCCCCGCGGCTCTCGGCGGAGCCCCGCGCCCGCCGCGCCATGGCCCGAAG | |
| | ACCCCGGCACAGCATATATAGCAGTGACGAGGATGATGAGGACTTTGAGATGTGTGACCATGACTATGAT | |
| | GGGCTGCTTCCCAAGTCTGGAAAGCGTCACTTGGGGAAAACAAGGTGGACCCGGGAAGAGGATGAAAAAC | |
| | TGAAGAAGCTGGTGGAACAGAATGGAACAGATGACTGGAAAGTTATTGCCAATTATCTCCCGAATCGAAC | |
| | AGATGTGCAGTGCCAGCACCGATGGCAGAAAGTACTAAACCCTGAGCTCATCAAGGGTCCTTGGACCAAA | |
| | GAAGAAGATCAGAGAGTGATAGAGCTTGTACAGAAATACGGTCCGAAACGTTGGTCTGTTATTGCCAAGC | |
| | ACTTAAAGGGGAGAATTGGAAAACAATGTAGGGAGAGGTGGCATAACCACTTGAATCCAGAAGTTAAGAA | |
| | AACCTCCTGGACAGAAGAGGAAGACAGAATTATTTACCAGGCACACAAGAGACTGGGGAACAGATGGGCA | |
| | GAAATCGCAAAGCTACTGCCTGGACGAACTGATAATGCTATCAAGAACCACTGGAATTCTACAATGCGTC | |
| | GGAAGGTCGAACAGGAAGGTTATCTGCAGGAGTCTTCAAAAGCCAGCCAGCCAGCAGTGGCCACAAGCTT | |
| | CCAGAAGAACAGTCATTTGATGGGTTTTGCTCAGGCTCCGCCTACAGCTCAACTCCCTGCCACTGGCCAG | |
| | CCCACTGTTAACAACGACTATTCCTATTACCACATTTCTGAAGCACAAAATGTCTCCAGTCATGTTCCAT | |
| | ACCCTGTAGCGTTACATGTAAATATAGTCAATGTCCCTCAGCCAGCTGCCGCAGCCATTCAGAGACACTA | |
| | TAATGATGAAGACCCTGAGAAGGAAAAGCGAATAAAGGAATTAGAATTGCTCCTAATGTCAACCGAGAAT | |
| | GAGCTAAAAGGACAGCAGGTGCTACCAACACAGAACCACACATGCAGCTACCCCGGGTGGCACAGCACCA | |
| | CCATTGCCGACCACACCAGACCTCATGGAGACAGTGCACCTGTTTCCTGTTTGGGAGAACACCACTCCAC | |
| | TCCATCTCTGCCAGCGGATCCTGGCTCCCTACCTGAAGAAAGCGCCTCGCCAGCAAGGTGCATGATCGTC | |
| | CACCAGGGCACCATTCTGGATAATGTTAAGAACCTCTTAGAATTTGCAGAAACACTCCAATTTATAGATT | |
| | CTTTCTTAAACACTTCCAGTAACCATGAAAACTCAGACTTGGAAATGCCTTCTTTAACTTCCACCCCCCT | |
| | CATTGGTCACAAATTGACTGTTACAACACCATTTCATAGAGACCAGACTGTGAAAACTCAAAAGGAAAAT | |
| | ACTGTTTTTAGAACCCCAGCTATCAAAAGGTCAATCTTAGAAAGCTCTCCAAGAACTCCTACACCATTCA | |
| | AACATGCACTTGCAGCTCAAGAAATTAAATACGGTCCCCTGAAGATGCTACCTCAGACACCCTCTCATCT | |
| | AGTAGAAGATCTGCAGGATGTGATCAAACAGGAATCTGATGAATCTGGAATTGTTGCTGAGTTTCAAGAA | |
| | AATGGACCACCCTTACTGAAGAAAATCAAACAAGAGGTGGAATCTCCAACTGATAAATCAGGAAACTTCT | |
| | TCTGCTCACACCACTGGGAAGGGGACAGTCTGAATACCCAACTGTTCACGCAGACCTCGCCTGTGGCAGA | |
| | TGCACCGAATATTCTTACAAGCTCCGTTTTAATGGCACCAGCATCAGAAGATGAAGACAATGTTCTCAAA | |
| | GCATTTACAGTACCTAAAAACAGGTCCCTGGCGAGCCCCTTGCAGCCTTGTAGCAGTACCTGGGAACCTG | |
| | CATCCTGTGGAAAGATGGAGGAGCAGATGACATCTTCCAGTCAAGCTCGTAAATACGTGAATGCATTCTC | |
| | AGCCCGGACGCTGGTCATGTGAGACATTTCCAGAAAAGCATTATGGTTTTCAGAACACTTCAAGTTGACT | |
| | TGGGATATATCATTCCTCAACATGAAACTTTTCATGAATGGGAGAAGAACCTATTTTTGTTGTGGTACAA | |
| | CAGTTGAGAGCAGCACCAAGTGCATTTAGTTGAATGAAGTCTTCTTGGATTTCACCCAACTAAAAGGATT | |
| | TTTAAAAATAAATAACAGTCTTACCTAAATTATTAGGTAATGAATTGTAGCCAGTTGTTAATATCTTAAT | |
| | GCAGATTTTTTTAAAAAAAACATAAAATGATTTATCTGTATTTTAAAGGATCCAACAGATCAGTATTTTT | |
| | TCCTGTGATGGGTTTTTTGAAATTTGACACATTAAAAGGTACTCCAGTATTTCACTTTTCTCGATCACTA | |
| | AACATATGCATATATTTTTAAAAATCAGTAAAAGCATTACTCTAAGTGTAGACTTAATACCATGTGACAT | |
| | TTAATCCAGATTGTAAATGCTCATTTATGGTTAATGACATTGAAGGTACATTTATTGTACCAAACCATTT | |
| | TATGAGTTTTCTGTTAGCTTGCTTTAAAAATTATTACTGTAAGAAATAGTTTTATAAAAAATTATATTTT | |
| | TATTCAGTAATTTAATTTTGTAAATGCCAAATGAAAAACGTTTTTTGCTGCTATGGTCTTAGCCTGTAGA | |
| | CATGCTGCTAGTATCAGAGGGGCAGTAGAGCTTGGACAGAAAGAAAAGAAACTTGGTGTTAGGTAATTGA | |
| | CTATGCACTAGTATTTCAGACTTTTTAATTTTATATATATATACATTTTTTTTCCTTCTGCAATACATTT | |
| | GAAAACTTGTTTGGGAGACTCTGCATTTTTTATTGTGGTTTTTTTGTTATTGTTGGTTTATACAAGCATG | |
| | CGTTGCACTTCTTTTTTGGGAGATGTGTGTTGTTGATGTTCTATGTTTTGTTTTGAGTGTAGCCTGACTG | |
| | TTTTATAATTTGGGAGTTCTGCATTTGATCCGCATCCCCTGTGGTTTCTAAGTGTATGGTCTCAGAACTG | |
| | TTGCATGGATCCTGTGTTTGCAACTGGGGAGACAGAAACTGTGGTTGATAGCCAGTCACTGCCTTAAGAA | |
| | CATTTGATGCAAGATGGCCAGCACTGAACTTTTGAGATATGACGGTGTACTTACTGCCTTGTAGCAAAAT | |
| | AAAGATGTGCCCTTATTTTACCTAAAAAAAAAAAAAAAAAAAAAAAAAAAAA | |
| OGFRL1 | CGCGAGGGTGCCTGTCCGCCGCTCGCCGCGCTGAGGCAGTGCGGGGCGGGCGCGCCTAGGCTGCCGCCCA | 128 |
| NM_024576.3 | GCGCCCTCGCCGCGGCCATGCCCGGGCCCTAGAGCGCCTGCCGCAGCTTGCGCCCCGCAGCCCCGCAGCC | |
| | CCGCGCCCGCCGCCGCCTCTTCAATGGGCAACCTGCTCGGCGGGGTCAGCTTCCGCGAGCCCACCACCGT | |
| | GGAGGACTGCGACTCCACCTGGCAGACCGACTCGGAGCCCGAGCCCGAAGAACCAGGGCCGGGCGGCGGC | |
| | AGCGAGGGCCCGGGGCAGGAGTCCGAGCAGCCCGCGCAGCCCCCGGAGCAAGCCGGCGGGCGGCCCGGCG | |
| | CCAGCCCCGCGCCGGACGAGGACGCCGAGGCGGCGGGCGCCGAGCAGGGTGGTGATTCCACTGAAGCAAC | |
| | TGCCAAACCAAAGAGAAGTTTTTATGCTGCCAGGGATTTGTACAAGTACCGACACCAGTACCCAAACTTC | |
| | AAAGATATCCGATATCAAAATGACTTGAGCAATCTTCGTTTTTATAAGAATAAAATTCCATTCAAGCCAG | |
| | ATGGTGTTTACATTGAAGAAGTTCTAAGTAAATGGAAAGGAGATTATGAAAAACTGGAGCACAACCACAC | |
| | TTACATTCAATGGCTTTTCCCCCTGAGAGAACAAGGCTTGAACTTCTATGCCAAAGAACTAACTACATAT | |
| | GAAATTGAGGAATTCAAAAAAACAAAAGAAGCAATTAGAAGATTCCTCCTGGCTTATAAAATGATGCTAG | |
| | AATTTTTTGGAATAAAACTGACTGATAAAACTGGAAATGTTGCTCGGGCTGTTAACTGGCAGGAAAGATT | |
| | TCAGCATCTGAATGAGTCCCAGCACAACTATTTAAGAATCACTCGTATTCTTAAAAGCCTTGGTGAGCTT | |
| | GGATATGAAAGTTTTAAATCTCCTCTTGTAAAATTTATTCTTCATGAAGCTCTTGTGGAGAATACTATTC | |
| | CCAATATTAAGCAGAGTGCTCTAGAGTATTTTGTTTATACAATTAGAGACAGAAGAGAAAGGAGAAAGCT | |
| | CCTGCGGTTCGCCCAGAAACACTACACGCCTTCAGAGAACTTTATCTGGGGACCGCCTCGAAAAGAACAG | |
| | TCGGAGGGAAGCAAAGCCCAGAAAATGTCTTCCCCTCTCGCCTCCAGTCATAACAGTCAAACTTCTATGC | |
| | ACAAAAAAGCCAAGGACTCCAAAAATTCCTCCTCAGCTGTTCATTTAAATAGCAAAACAGCTGAAGACAA | |
| | AAAAGTGGCACCAAAAGAGCCTGTGGAAGAGACAGACAGGCCCAGCCCAGAGCCCAGCAATGAAGCTGCC | |
| | AAGCCAAGAAATACAGAGAAGGACAGTAATGCTGAGAACATGAATTCTCAACCTGAGAAAACAGTTACTA | |
| | CTCCCACAGAAAAAAAGGAGAGTGTATCTCCTGAGAATAACGAAGAAGGTGGAAATGATAACCAAGACAA | |
| | TGAAAATCCTGGAAATACAAATTGCCATGATGTTGTACTAGTACAGTGAATTATCAGAAAACCCAGAAGC | |
| | CAGTTTAGGCTAGAGAGGAAAAAACTACTGTATCATTTATCCTAAAGAACAGAGATGAGGTCAATTTCAA | |
| | ATTTTAGCCATCTGTTTGTGATTTCTGTCATAAGCATTTTGTTGTTTGTTTTTTTATTTTGGATGACAAT | |
| | GAATTGAATATCTAATAAGGAGATTTAAGATAAGACCCAATAAATGAATGTATTCTGTAAAAAAAAAAAA | |
| | AAAAA | |
| KIF2C | ACGCTTGCGCGCGGGATTTAAACTGCGGCGGTTTACGCGGCGTTAAGACTTCGTAGGGTTAGCGAAATTG | 129 |
| NM_006845.3 | AGGTTTCTTGGTATTGCGCGTTTCTCTTCCTTGCTGACTCTCCGAATGGCCATGGACTCGTCGCTTCAGG | |
| | CCCGCCTGTTTCCCGGTCTCGCTATCAAGATCCAACGCAGTAATGGTTTAATTCACAGTGCCAATGTAAG | |
| | GACTGTGAACTTGGAGAAATCCTGTGTTTCAGTGGAATGGGCAGAAGGAGGTGCCACAAAGGGCAAAGAG | |
| | ATTGATTTTGATGATGTGGCTGCAATAAACCCAGAACTCTTACAGCTTCTTCCCTTACATCCGAAGGACA | |
| | ATCTGCCCTTGCAGGAAAATGTAACAATCCAGAAACAAAAACGGAGATCCGTCAACTCCAAAATTCCTGC | |
| | TCCAAAAGAAAGTCTTCGAAGCCGCTCCACTCGCATGTCCACTGTCTCAGAGCTTCGCATCACGGCTCAG | |
| | GAGAATGACATGGAGGTGGAGCTGCCTGCAGCTGCAAACTCCCGCAAGCAGTTTTCAGTTCCTCCTGCCC | |
| | CCACTAGGCCTTCCTGCCCTGCAGTGGCTGAAATACCATTGAGGATGGTCAGCGAGGAGATGGAAGAGCA | |
| | AGTCCATTCCATCCGAGGCAGCTCTTCTGCAAACCCTGTGAACTCAGTTCGGAGGAAATCATGTCTTGTG | |
| | AAGGAAGTGGAAAAAATGAAGAACAAGCGAGAAGAGAAGAAGGCCCAGAACTCTGAAATGAGAATGAAGA | |
| | GAGCTCAGGAGTATGACAGTAGTTTTCCAAACTGGGAATTTGCCCGAATGATTAAAGAATTTCGGGCTAC | |
| | TTTGGAATGTCATCCACTTACTATGACTGATCCTATCGAAGAGCACAGAATATGTGTCTGTGTTAGGAAA | |
| | CGCCCACTGAATAAGCAAGAATTGGCCAAGAAAGAAATTGATGTGATTTCCATTCCTAGCAAGTGTCTCC | |
| | TCTTGGTACATGAACCCAAGTTGAAAGTGGACTTAACAAAGTATCTGGAGAACCAAGCATTCTGCTTTGA | |
| | CTTTGCATTTGATGAAACAGCTTCGAATGAAGTTGTCTACAGGTTCACAGCAAGGCCACTGGTACAGACA | |
| | ATCTTTGAAGGTGGAAAAGCAACTTGTTTTGCATATGGCCAGACAGGAAGTGGCAAGACACATACTATGG | |
| | GCGGAGACCTCTCTGGGAAAGCCCAGAATGCATCCAAAGGGATCTATGCCATGGCCTCCCGGGACGTCTT | |
| | CCTCCTGAAGAATCAACCCTGCTACCGGAAGTTGGGCCTGGAAGTCTATGTGACATTCTTCGAGATCTAC | |
| | AATGGGAAGCTGTTTGACCTGCTCAACAAGAAGGCCAAGCTGCGCGTGCTGGAGGACGGCAAGCAACAGG | |
| | TGCAAGTGGTGGGGCTGCAGGAGCATCTGGTTAACTCTGCTGATGATGTCATCAAGATGATCGACATGGG | |
| | CAGCGCCTGCAGAACCTCTGGGCAGACATTTGCCAACTCCAATTCCTCCCGCTCCCACGCGTGCTTCCAA | |
| | ATTATTCTTCGAGCTAAAGGGAGAATGCATGGCAAGTTCTCTTTGGTAGATCTGGCAGGGAATGAGCGAG | |
| | GCGCGGACACTTCCAGTGCTGACCGGCAGACCCGCATGGAGGGCGCAGAAATCAACAAGAGTCTCTTAGC | |
| | CCTGAAGGAGTGCATCAGGGCCCTGGGACAGAACAAGGCTCACACCCCGTTCCGTGAGAGCAAGCTGACA | |
| | CAGGTGCTGAGGGACTCCTTCATTGGGGAGAACTCTAGGACTTGCATGATTGCCACGATCTCACCAGGCA | |
| | TAAGCTCCTGTGAATATACTTTAAACACCCTGAGATATGCAGACAGGGTCAAGGAGCTGAGCCCCCACAG | |
| | TGGGCCCAGTGGAGAGCAGTTGATTCAAATGGAAACAGAAGAGATGGAAGCCTGCTCTAACGGGGCGCTG | |
| | ATTCCAGGCAATTTATCCAAGGAAGAGGAGGAACTGTCTTCCCAGATGTCCAGCTTTAACGAAGCCATGA | |
| | CTCAGATCAGGGAGCTGGAGGAGAAGGCTATGGAAGAGCTCAAGGAGATCATACAGCAAGGACCAGACTG | |
| | GCTTGAGCTCTCTGAGATGACCGAGCAGCCAGACTATGACCTGGAGACCTTTGTGAACAAAGCGGAATCT | |
| | GCTCTGGCCCAGCAAGCCAAGCATTTCTCAGCCCTGCGAGATGTCATCAAGGCCTTGCGCCTGGCCATGC | |
| | AGCTGGAAGAGCAGGCTAGCAGACAAATAAGCAGCAAGAAACGGCCCCAGTGACGACTGCAAATAAAAAT | |
| | CTGTTTGGTTTGACACCCAGCCTCTTCCCTGGCCCTCCCCAGAGAACTTTGGGTACCTGGTGGGTCTAGG | |
| | CAGGGTCTGAGCTGGGACAGGTTCTGGTAAATGCCAAGTATGGGGGCATCTGGGCCCAGGGCAGCTGGGG | |
| | AGGGGGTCAGAGTGACATGGGACACTCCTTTTCTGTTCCTCAGTTGTCGCCCTCACGAGAGGAAGGAGCT | |
| | CTTAGTTACCCTTTTGTGTTGCCCTTCTTTCCATCAAGGGGAATGTTCTCAGCATAGAGCTTTCTCCGCA | |
| | GCATCCTGCCTGCGTGGACTGGCTGCTAATGGAGAGCTCCCTGGGGTTGTCCTGGCTCTGGGGAGAGAGA | |
| | CGGAGCCTTTAGTACAGCTATCTGCTGGCTCTAAACCTTCTACGCCTTTGGGCCGAGCACTGAATGTCTT | |
| | GTACTTTAAAAAAATGTTTCTGAGACCTCTTTCTACTTTACTGTCTCCCTAGAGATCCTAGAGGATCCCT | |
| | ACTGTTTTCTGTTTTATGTGTTTATACATTGTATGTAACAATAAAGAGAAAAAATAAATCAGCTGTTTAA | |
| | GTGTGTGGAAAAAAAAAAAAAAAAAA | |
| RRM2 | AAAATCGCGCGCGGCCCCGCGGCCAGCCTGGGTAGGGGCAAGGCGCAGCCAATGGGAAGGGTCGGAGGCA | 130 |
| NM_001165931.1 | TGGCACAGCCAATGGGAAGGGCCGGGGCACCAAAGCCAATGGGAAGGGCCGGGAGCGCGCGGCGCGGGAG | |
| | ATTTAAAGGCTGCTGGAGTGAGGGGTCGCCCGTGCACCCTGTCCCAGCCGTCCTGTCCTGGCTGCTCGCT | |
| | CTGCTTCGCTGCGCCTCCACTATGCTCTCCCTCCGTGTCCCGCTCGCGCCCATCACGGACCCGCAGCAGC | |
| | TGCAGCTCTCGCCGCTGAAGGGGCTCAGCTTGGTCGACAAGGAGAACACGCCGCCGGCCCTGAGCGGGAC | |
| | CCGCGTCCTGGCCAGCAAGACCGCGAGGAGGATCTTCCAGGAGCCCACGGAGCCGAAAACTAAAGCAGCT | |
| | GCCCCCGGCGTGGAGGATGAGCCGCTGCTGAGAGAAAACCCCCGCCGCTTTGTCATCTTCCCCATCGAGT | |
| | ACCATGATATCTGGCAGATGTATAAGAAGGCAGAGGCTTCCTTTTGGACCGCCGAGGAGGTGGACCTCTC | |
| | CAAGGACATTCAGCACTGGGAATCCCTGAAACCCGAGGAGAGATATTTTATATCCCATGTTCTGGCTTTC | |
| | TTTGCAGCAAGCGATGGCATAGTAAATGAAAACTTGGTGGAGCGATTTAGCCAAGAAGTTCAGATTACAG | |
| | AAGCCCGCTGTTTCTATGGCTTCCAAATTGCCATGGAAAACATACATTCTGAAATGTATAGTCTTCTTAT | |
| | TGACACTTACATAAAAGATCCCAAAGAAAGGGAATTTCTCTTCAATGCCATTGAAACGATGCCTTGTGTC | |
| | AAGAAGAAGGCAGACTGGGCCTTGCGCTGGATTGGGGACAAAGAGGCTACCTATGGTGAACGTGTTGTAG | |
| | CCTTTGCTGCAGTGGAAGGCATTTTCTTTTCCGGTTCTTTTGCGTCGATATTCTGGCTCAAGAAACGAGG | |
| | ACTGATGCCTGGCCTCACATTTTCTAATGAACTTATTAGCAGAGATGAGGGTTTACACTGTGATTTTGCT | |
| | TGCCTGATGTTCAAACACCTGGTACACAAACCATCGGAGGAGAGAGTAAGAGAAATAATTATCAATGCTG | |
| | TTCGGATAGAACAGGAGTTCCTCACTGAGGCCTTGCCTGTGAAGCTCATTGGGATGAATTGCACTCTAAT | |
| | GAAGCAATACATTGAGTTTGTGGCAGACAGACTTATGCTGGAACTGGGTTTTAGCAAGGTTTTCAGAGTA | |
| | GAGAACCCATTTGACTTTATGGAGAATATTTCACTGGAAGGAAAGACTAACTTCTTTGAGAAGAGAGTAG | |
| | GCGAGTATCAGAGGATGGGAGTGATGTCAAGTCCAACAGAGAATTCTTTTACCTTGGATGCTGACTTCTA | |
| | AATGAACTGAAGATGTGCCCTTACTTGGCTGATTTTTTTTTTCCATCTCATAAGAAAAATCAGCTGAAGT | |
| | GTTACCAACTAGCCACACCATGAATTGTCCGTAATGTTCATTAACAGCATCTTTAAAACTGTGTAGCTAC | |
| | CTCACAACCAGTCCTGTCTGTTTATAGTGCTGGTAGTATCACCTTTTGCCAGAAGGCCTGGCTGGCTGTG | |
| | ACTTACCATAGCAGTGACAATGGCAGTCTTGGCTTTAAAGTGAGGGGTGACCCTTTAGTGAGCTTAGCAC | |
| | AGCGGGATTAAACAGTCCTTTAACCAGCACAGCCAGTTAAAAGATGCAGCCTCACTGCTTCAACGCAGAT | |
| | TTTAATGTTTACTTAAATATAAACCTGGCACTTTACAAACAAATAAACATTGTTTGTACTCACAAGGCGA | |
| | TAATAGCTTGATTTATTTGGTTTCTACACCAAATACATTCTCCTGACCACTAATGGGAGCCAATTCACAA | |
| | TTCACTAAGTGACTAAAGTAAGTTAAACTTGTGTAGACTAAGCATGTAATTTTTAAGTTTTATTTTAATG | |
| | AATTAAAATATTTGTTAACCAACTTTAAAGTCAGTCCTGTGTATACCTAGATATTAGTCAGTTGGTGCCA | |
| | GATAGAAGACAGGTTGTGTTTTTATCCTGTGGCTTGTGTAGTGTCCTGGGATTCTCTGCCCCCTCTGAGT | |
| | AGAGTGTTGTGGGATAAAGGAATCTCTCAGGGCAAGGAGCTTCTTAAGTTAAATCACTAGAAATTTAGGG | |
| | GTGATCTGGGCCTTCATATGTGTGAGAAGCCGTTTCATTTTATTTCTCACTGTATTTTCCTCAACGTCTG | |
| | GTTGATGAGAAAAAATTCTTGAAGAGTTTTCATATGTGGGAGCTAAGGTAGTATTGTAAAATTTCAAGTC | |
| | ATCCTTAAACAAAATGATCCACCTAAGATCTTGCCCCTGTTAAGTGGTGAAATCAACTAGAGGTGGTTCC | |
| | TACAAGTTGTTCATTCTAGTTTTGTTTGGTGTAAGTAGGTTGTGTGAGTTAATTCATTTATATTTACTAT | |
| | GTCTGTTAAATCAGAAATTTTTTATTATCTATGTTCTTCTAGATTTTACCTGTAGTTCATACTTCAGTCA | |
| | CCCAGTGTCTTATTCTGGCATTGTCTAAATCTGAGCATTGTCTAGGGGGATCTTAAACTTTAGTAGGAAA | |
| | CCATGAGCTGTTAATACAGTTTCCATTCAAATATTAATTTCAGAATGAAACATAATTTTTTTTTTTTTTT | |
| | TTGAGATGGAGTCTCGCTCTGTTGCCCAGGCTGGAGTGCAGTGGCGCGATTTTGGCTCACTGTAACCTCC | |
| | ATCTCCTGGGTTCAAGCAATTCTCCTGTCTCAGCCTCCCTAGTAGCTGGGACTGCAGGTATGTGCTACCA | |
| | CACCTGGCTAATTTTTGTATTTTTAGTAGAGATGGAGTTTCACCATATTGGTCAGGCTGGTCTTGAACTC | |
| | CTGACCTCAGGTGATCCACCCACCTCGGCCTCCCAAAGTGCTGGGATTGCAGGCGTGATAAACAAATATT | |
| | CTTAATAGGGCTACTTTGAATTAATCTGCCTTTATGTTTGGGAGAAGAAAGCTGAGACATTGCATGAAAG | |
| | ATGATGAGAGATAAATGTTGATCTTTTGGCCCCATTTGTTAATTGTATTCAGTATTTGAACGTCGTCCTG | |
| | TTTATTGTTAGTTTTCTTCATCATTTATTGTATAGACAATTTTTAAATCTCTGTAATATGATACATTTTC | |
| | CTATCTTTTAAGTTATTGTTACCTAAAGTTAATCCAGATTATATGGTCCTTATATGTGTACAACATTAAA | |
| | ATGAAAGGCTTTGTCTTGCATTGTGAGGTACAGGCGGAAGTTGGAATCAGGTTTTAGGATTCTGTCTCTC | |
| | ATTAGCTGAATAATGTGAGGATTAACTTCTGCCAGCTCAGACCATTTCCTAATCAGTTGAAAGGGAAACA | |
| | AGTATTTCAGTCTCAAAATTGAATAATGCACAAGTCTTAAGTGATTAAAATAAAACTGTTCTTATGTCAG | |
| | TTTCAAAAAAAAAAAAAAAAAA | |
| FOXC1 | ATGCAGGCGCGCTACTCCGTGTCCAGCCCCAACTCCCTGGGAGTGGTGCCCTACCTCGGCGGCGAGCAGA | 131 |
| NM_001453.2 | GCTACTACCGCGCGGCGGCCGCGGCGGCCGGGGGCGGCTACACCGCCATGCCGGCCCCCATGAGCGTGTA | |
| | CTCGCACCCTGCGCACGCCGAGCAGTACCCGGGCGGCATGGCCCGCGCCTACGGGCCCTACACGCCGCAG | |
| | CCGCAGCCCAAGGACATGGTGAAGCCGCCCTATAGCTACATCGCGCTCATCACCATGGCCATCCAGAACG | |
| | CCCCGGACAAGAAGATCACCCTGAACGGCATCTACCAGTTCATCATGGACCGCTTCCCCTTCTACCGGGA | |
| | CAACAAGCAGGGCTGGCAGAACAGCATCCGCCACAACCTCTCGCTCAACGAGTGCTTCGTCAAGGTGCCG | |
| | CGCGACGACAAGAAGCCGGGCAAGGGCAGCTACTGGACGCTGGACCCGGACTCCTACAACATGTTCGAGA | |
| | ACGGCAGCTTCCTGCGGCGGCGGCGGCGCTTCAAGAAGAAGGACGCGGTGAAGGACAAGGAGGAGAAGGA | |
| | CAGGCTGCACCTCAAGGAGCCGCCCCCGCCCGGCCGCCAGCCCCCGCCCGCGCCGCCGGAGCAGGCCGAC | |
| | GGCAACGCGCCCGGTCCGCAGCCGCCGCCCGTGCGCATCCAGGACATCAAGACCGAGAACGGTACGTGCC | |
| | CCTCGCCGCCCCAGCCCCTGTCCCCGGCCGCCGCCCTGGGCAGCGGCAGCGCCGCCGCGGTGCCCAAGAT | |
| | CGAGAGCCCCGACAGCAGCAGCAGCAGCCTGTCCAGCGGGAGCAGCCCCCCGGGCAGCCTGCCGTCGGCG | |
| | CGGCCGCTCAGCCTGGACGGTGCGGATTCCGCGCCGCCGCCGCCCGCGCCCTCCGCCCCGCCGCCGCACC | |
| | ATAGCCAGGGCTTCAGCGTGGACAACATCATGACGTCGCTGCGGGGGTCGCCGCAGAGCGCGGCCGCGGA | |
| | GCTCAGCTCCGGCCTTCTGGCCTCGGCGGCCGCGTCCTCGCGCGCGGGGATCGCACCCCCGCTGGCGCTC | |
| | GGCGCCTACTCGCCCGGCCAGAGCTCCCTCTACAGCTCCCCCTGCAGCCAGACCTCCAGCGCGGGCAGCT | |
| | CGGGCGGCGGCGGCGGCGGCGCGGGGGCCGCGGGGGGCGCGGGCGGCGCCGGGACCTACCACTGCAACCT | |
| | GCAAGCCATGAGCCTGTACGCGGCCGGCGAGCGCGGGGGCCACTTGCAGGGCGCGCCCGGGGGCGCGGGC | |
| | GGCTCGGCCGTGGACGACCCCCTGCCCGACTACTCTCTGCCTCCGGTCACCAGCAGCAGCTCGTCGTCCC | |
| | TGAGTCACGGCGGCGGCGGCGGCGGCGGCGGGGGAGGCCAGGAGGCCGGCCACCACCCTGCGGCCCACCA | |
| | AGGCCGCCTCACCTCGTGGTACCTGAACCAGGCGGGCGGAGACCTGGGCCACTTGGCGAGCGCGGCGGCG | |
| | GCGGCGGCGGCCGCAGGCTACCCGGGCCAGCAGCAGAACTTCCACTCGGTGCGGGAGATGTTCGAGTCAC | |
| | AGAGGATCGGCTTGAACAACTCTCCAGTGAACGGGAATAGTAGCTGTCAAATGGCCTTCCCTTCCAGCCA | |
| | GTCTCTGTACCGCACGTCCGGAGCTTTCGTCTACGACTGTAGCAAGTTTTGACACACCCTCAAAGCCGAA | |
| | CTAAATCGAACCCCAAAGCAGGAAAAGCTAAAGGAACCCATCAAGGCAAAATCGAAACTAAAAAAAAAAA | |
| | ATCCAATTAAAAAAAACCCCTGAGAATATTCACCACACCAGCGAACAGAATATCCCTCCAAAAATTCAGC | |
| | TCACCAGCACCAGCACGAAGAAAACTCTATTTTCTTAACCGATTAATTCAGAGCCACCTCCACTTTGCCT | |
| | TGTCTAAATAAACAAACCCGTAAACTGTTTTATACAGAGACAGCAAAATCTTGGTTTATTAAAGGACAGT | |
| | GTTACTCCAGATAACACGTAAGTTTCTTCTTGCTTTTCAGAGACCTGCTTTCCCCTCCTCCCGTCTCCCC | |
| | TCTCTTGCCTTCTTCCTTGCCTCTCACCTGTAAGATATTATTTTATCCTATGTTGAAGGGAGGGGGAAAG | |
| | TCCCCGTTTATGAAAGTCGCTTTCTTTTTATTCATGGACTTGTTTTAAAATGTAAATTGCAACATAGTAA | |
| | TTTATTTTTAATTTGTAGTTGGATGTCGTGGACCAAACGCCAGAAAGTGTTCCCAAAACCTGACGTTAAA | |
| | TTGCCTGAAACTTTAAATTGTGCTTTTTTTCTCATTATAAAAAGGGAAACTGTATTAATCTTATTCTATC | |
| | CTCTTTTCTTTCTTTTTGTTGAACATATTCATTGTTTGTTTATTAATAAATTACCATTCAGTTTGAATGA | |
| | GACCTATATGTCTGGATACTTTAATAGAGCTTTAATTATTACGAAAAAAGATTTCAGAGATAAAACACTA | |
| | GAAGTTACCTATTCTCCACCTAAATCTCTGAAAAATGGAGAAACCCTCTGACTAGTCCATGTCAAATTTT | |
| | ACTAAAAGTCTTTTTGTTTAGATTTATTTTCCTGCAGCATCTTCTGCAAAATGTACTATATAGTCAGCTT | |
| | GCTTTGAGGCTAGTAAAAAGATATTTTTCTAAACAGATTGGAGTTGGCATATAAACAAATACGTTTTCTC | |
| | ACTAATGACAGTCCATGATTCGGAAATTTTAAGCCCATGAATCAGCCGCGGTCTTACCACGGTGATGCCT | |
| | GTGTGCCGAGAGATGGGACTGTGCGGCCAGATATGCACAGATAAATATTTGGCTTGTGTATTCCATATAA | |
| | AATTGCAGTGCATATTATACATCCCTGTGAGCCAGATGCTGAATAGATATTTTCCTATTATTTCAGTCCT | |
| | TTATAAAAGGAAAAATAAACCAGTTTTTAAATGTATGTATATAATTCTCCCCCATTTACAATCCTTCATG | |
| | TATTACATAGAAGGATTGCTTTTTTAAAAATATACTGCGGGTTGGAAAGGGATATTTAATCTTTGAGAAA | |
| | CTATTTTAGAAAATATGTTTGTAGAACAATTATTTTTGAAAAAGATTTAAAGCAATAACAAGAAGGAAGG | |
| | CGAGAGGAGCAGAACATTTTGGTCTAGGGTGGTTTCTTTTTAAACCATTTTTTCTTGTTAATTTACAGTT | |
| | AAACCTAGGGGACAATCCGGATTGGCCCTCCCCCTTTTGTAAATAACCCAGGAAATGTAATAAATTCATT | |
| | ATCTTAGGGTGATCTGCCCTGCCAATCAGACTTTGGGGAGATGGCGATTTGATTACAGACGTTCGGGGGG | |
| | GTGGGGGGCTTGCAGTTTGTTTTGGAGATAATACAGTTTCCTGCTATCTGCCGCTCCTATCTAGAGGCAA | |
| | CACTTAAGCAGTAATTGCTGTTGCTTGTTGTCAAAATTTGATCATTGTTAAAGGATTGCTGCAAATAAAT | |
| | ACACTTTAATTTCAGTCAAAAA | |
| SFRP1 | GCACTCCAGCCCTGCAGCCTCCGGAGTCAGTGCCGCGCGCCCGCCGCCCCGCGCCTTCCTGCTCGCCGCA | 132 |
| NM_003012.4 | CCTCCGGGAGCCGGGGCGCACCCAGCCCGCAGCGCCGCCTCCCCGCCCGCGCCGCCTCCGACCGCAGGCC | |
| | GAGGGCCGCCACTGGCCGGGGGGACCGGGCAGCAGCTTGCGGCCGCGGAGCCGGGCAACGCTGGGGACTG | |
| | CGCCTTTTGTCCCCGGAGGTCCCTGGAAGTTTGCGGCAGGACGCGCGCGGGGAGGCGGCGGAGGCAGCCC | |
| | CGACGTCGCGGAGAACAGGGCGCAGAGCCGGCATGGGCATCGGGCGCAGCGAGGGGGGCCGCCGCGGGGC | |
| | AGCCCTGGGCGTGCTGCTGGCGCTGGGCGCGGCGCTTCTGGCCGTGGGCTCGGCCAGCGAGTACGACTAC | |
| | GTGAGCTTCCAGTCGGACATCGGCCCGTACCAGAGCGGGCGCTTCTACACCAAGCCACCTCAGTGCGTGG | |
| | ACATCCCCGCGGACCTGCGGCTGTGCCACAACGTGGGCTACAAGAAGATGGTGCTGCCCAACCTGCTGGA | |
| | GCACGAGACCATGGCGGAGGTGAAGCAGCAGGCCAGCAGCTGGGTGCCCCTGCTCAACAAGAACTGCCAC | |
| | GCCGGCACCCAGGTCTTCCTCTGCTCGCTCTTCGCGCCCGTCTGCCTGGACCGGCCCATCTACCCGTGTC | |
| | GCTGGCTCTGCGAGGCCGTGCGCGACTCGTGCGAGCCGGTCATGCAGTTCTTCGGCTTCTACTGGCCCGA | |
| | GATGCTTAAGTGTGACAAGTTCCCCGAGGGGGACGTCTGCATCGCCATGACGCCGCCCAATGCCACCGAA | |
| | GCCTCCAAGCCCCAAGGCACAACGGTGTGTCCTCCCTGTGACAACGAGTTGAAATCTGAGGCCATCATTG | |
| | AACATCTCTGTGCCAGCGAGTTTGCACTGAGGATGAAAATAAAAGAAGTGAAAAAAGAAAATGGCGACAA | |
| | GAAGATTGTCCCCAAGAAGAAGAAGCCCCTGAAGTTGGGGCCCATCAAGAAGAAGGACCTGAAGAAGCTT | |
| | GTGCTGTACCTGAAGAATGGGGCTGACTGTCCCTGCCACCAGCTGGACAACCTCAGCCACCACTTCCTCA | |
| | TCATGGGCCGCAAGGTGAAGAGCCAGTACTTGCTGACGGCCATCCACAAGTGGGACAAGAAAAACAAGGA | |
| | GTTCAAAAACTTCATGAAGAAAATGAAAAACCATGAGTGCCCCACCTTTCAGTCCGTGTTTAAGTGATTC | |
| | TCCCGGGGGCAGGGTGGGGAGGGAGCCTCGGGTGGGGTGGGAGCGGGGGGGACAGTGCCCCGGGAACCCG | |
| | GTGGGTCACACACACGCACTGCGCCTGTCAGTAGTGGACATTGTAATCCAGTCGGCTTGTTCTTGCAGCA | |
| | TTCCCGCTCCCTTCCCTCCATAGCCACGCTCCAAACCCCAGGGTAGCCATGGCCGGGTAAAGCAAGGGCC | |
| | ATTTAGATTAGGAAGGTTTTTAAGATCCGCAATGTGGAGCAGCAGCCACTGCACAGGAGGAGGTGACAAA | |
| | CCATTTCCAACAGCAACACAGCCACTAAAACACAAAAAGGGGGATTGGGCGGAAAGTGAGAGCCAGCAGC | |
| | AAAAACTACATTTTGCAACTTGTTGGTGTGGATCTATTGGCTGATCTATGCCTTTCAACTAGAAAATTCT | |
| | AATGATTGGCAAGTCACGTTGTTTTCAGGTCCAGAGTAGTTTCTTTCTGTCTGCTTTAAATGGAAACAGA | |
| | CTCATACCACACTTACAATTAAGGTCAAGCCCAGAAAGTGATAAGTGCAGGGAGGAAAAGTGCAAGTCCA | |
| | TTATGTAATAGTGACAGCAAAGGGACCAGGGGAGAGGCATTGCCTTCTCTGCCCACAGTCTTTCCGTGTG | |
| | ATTGTCTTTGAATCTGAATCAGCCAGTCTCAGATGCCCCAAAGTTTCGGTTCCTATGAGCCCGGGGCATG | |
| | ATCTGATCCCCAAGACATGTGGAGGGGCAGCCTGTGCCTGCCTTTGTGTCAGAAAAAGGAAACCACAGTG | |
| | AGCCTGAGAGAGACGGCGATTTTCGGGCTGAGAAGGCAGTAGTTTTCAAAACACATAGTTAAAAAAGAAA | |
| | CAAATGAAAAAAATTTTAGAACAGTCCAGCAAATTGCTAGTCAGGGTGAATTGTGAAATTGGGTGAAGAG | |
| | CTTAGGATTCTAATCTCATGTTTTTTCCTTTTCACATTTTTAAAAGAACAATGACAAACACCCACTTATT | |
| | TTTCAAGGTTTTAAAACAGTCTACATTGAGCATTTGAAAGGTGTGCTAGAACAAGGTCTCCTGATCCGTC | |
| | CGAGGCTGCTTCCCAGAGGAGCAGCTCTCCCCAGGCATTTGCCAAGGGAGGCGGATTTCCCTGGTAGTGT | |
| | AGCTGTGTGGCTTTCCTTCCTGAAGAGTCCGTGGTTGCCCTAGAACCTAACACCCCCTAGCAAAACTCAC | |
| | AGAGCTTTCCGTTTTTTTCTTTCCTGTAAAGAAACATTTCCTTTGAACTTGATTGCCTATGGATCAAAGA | |
| | AATTCAGAACAGCCTGCCTGTCCCCCCGCACTTTTTACATATATTTGTTTCATTTCTGCAGATGGAAAGT | |
| | TGACATGGGTGGGGTGTCCCCATCCAGCGAGAGAGTTTCAAAAGCAAAACATCTCTGCAGTTTTTCCCAA | |
| | GTACCCTGAGATACTTCCCAAAGCCCTTATGTTTAATCAGCGATGTATATAAGCCAGTTCACTTAGACAA | |
| | CTTTACCCTTCTTGTCCAATGTACAGGAAGTAGTTCTAAAAAAAATGCATATTAATTTCTTCCCCCAAAG | |
| | CCGGATTCTTAATTCTCTGCAACACTTTGAGGACATTTATGATTGTCCCTCTGGGCCAATGCTTATACCC | |
| | AGTGAGGATGCTGCAGTGAGGCTGTAAAGTGGCCCCCTGCGGCCCTAGCCTGACCCGGAGGAAAGGATGG | |
| | TAGATTCTGTTAACTCTTGAAGACTCCAGTATGAAAATCAGCATGCCCGCCTAGTTACCTACCGGAGAGT | |
| | TATCCTGATAAATTAACCTCTCACAGTTAGTGATCCTGTCCTTTTAACACCTTTTTTGTGGGGTTCTCTC | |
| | TGACCTTTCATCGTAAAGTGCTGGGGACCTTAAGTGATTTGCCTGTAATTTTGGATGATTAAAAAATGTG | |
| | TATATATATTAGCTAATTAGAAATATTCTACTTCTCTGTTGTCAAACTGAAATTCAGAGCAAGTTCCTGA | |
| | GTGCGTGGATCTGGGTCTTAGTTCTGGTTGATTCACTCAAGAGTTCAGTGCTCATACGTATCTGCTCATT | |
| | TTGACAAAGTGCCTCATGCAACCGGGCCCTCTCTCTGCGGCAGAGTCCTTAGTGGAGGGGTTTACCTGGA | |
| | ACATTAGTAGTTACCACAGAATACGGAAGAGCAGGTGACTGTGCTGTGCAGCTCTCTAAATGGGAATTCT | |
| | CAGGTAGGAAGCAACAGCTTCAGAAAGAGCTCAAAATAAATTGGAAATGTGAATCGCAGCTGTGGGTTTT | |
| | ACCACCGTCTGTCTCAGAGTCCCAGGACCTTGAGTGTCATTAGTTACTTTATTGAAGGTTTTAGACCCAT | |
| | AGCAGCTTTGTCTCTGTCACATCAGCAATTTCAGAACCAAAAGGGAGGCTCTCTGTAGGCACAGAGCTGC | |
| | ACTATCACGAGCCTTTGTTTTTCTCCACAAAGTATCTAACAAAACCAATGTGCAGACTGATTGGCCTGGT | |
| | CATTGGTCTCCGAGAGAGGAGGTTTGCCTGTGATTTCCTAATTATCGCTAGGGCCAAGGTGGGATTTGTA | |
| | AAGCTTTACAATAATCATTCTGGATAGAGTCCTGGGAGGTCCTTGGCAGAACTCAGTTAAATCTTTGAAG | |
| | AATATTTGTAGTTATCTTAGAAGATAGCATGGGAGGTGAGGATTCCAAAAACATTTTATTTTTAAAATAT | |
| | CCTGTGTAACACTTGGCTCTTGGTACCTGTGGGTTAGCATCAAGTTCTCCCCAGGGTAGAATTCAATCAG | |
| | AGCTCCAGTTTGCATTTGGATGTGTAAATTACAGTAATCCCATTTCCCAAACCTAAAATCTGTTTTTCTC | |
| | ATCAGACTCTGAGTAACTGGTTGCTGTGTCATAACTTCATAGATGCAGGAGGCTCAGGTGATCTGTTTGA | |
| | GGAGAGCACCCTAGGCAGCCTGCAGGGAATAACATACTGGCCGTTCTGACCTGTTGCCAGCAGATACACA | |
| | GGACATGGATGAAATTCCCGTTTCCTCTAGTTTCTTCCTGTAGTACTCCTCTTTTAGATCCTAAGTCTCT | |
| | TACAAAAGCTTTGAATACTGTGAAAATGTTTTACATTCCATTTCATTTGTGTTGTTTTTTTAACTGCATT | |
| | TTACCAGATGTTTTGATGTTATCGCTTATGTTAATAGTAATTCCCGTACGTGTTCATTTTATTTTCATGC | |
| | TTTTTCAGCCATGTATCAATATTCACTTGACTAAAATCACTCAATTAATCAATGATAAAAAAAAAAAAAA | |
| | AA | |
| AURKA | ACAAGGCAGCCTCGCTCGAGCGCAGGCCAATCGGCTTTCTAGCTAGAGGGTTTAACTCCTATTTAAAAAG | 133 |
| NM_198433.1 | AAGAACCTTTGAATTCTAACGGCTGAGCTCTTGGAAGACTTGGGTCCTTGGGTCGCAGGTGGGAGCCGAC | |
| | GGGTGGGTAGACCGTGGGGGATATCTCAGTGGCGGACGAGGACGGCGGGGACAAGGGGCGGCTGGTCGGA | |
| | GTGGCGGAGCGTCAAGTCCCCTGTCGGTTCCTCCGTCCCTGAGTGTCCTTGGCGCTGCCTTGTGCCCGCC | |
| | CAGCGCCTTTGCATCCGCTCCTGGGCACCGAGGCGCCCTGTAGGATACTGCTTGTTACTTATTACAGCTA | |
| | GAGGGTCTCACTCCATTGCCCAGGCCAGAGTGCGGGGATATTTGATAAGAAACTTCAGTGAAGGCCGGGC | |
| | GCGGTGGCTCATGCCCGTAATCCCAGCATTTTCGGAGGCCGAGGCTGGAGTGCAATGGTGTGATCTCAGC | |
| | TCACTGCAACCTCTGCTTCCTGGGTTTAAGTGATTCTCCTGCCTCAGCCTCCCGAGTAGCTGGGATTACA | |
| | GGCATCATGGACCGATCTAAAGAAAACTGCATTTCAGGACCTGTTAAGGCTACAGCTCCAGTTGGAGGTC | |
| | CAAAACGTGTTCTCGTGACTCAGCAATTTCCTTGTCAGAATCCATTACCTGTAAATAGTGGCCAGGCTCA | |
| | GCGGGTCTTGTGTCCTTCAAATTCTTCCCAGCGCATTCCTTTGCAAGCACAAAAGCTTGTCTCCAGTCAC | |
| | AAGCCGGTTCAGAATCAGAAGCAGAAGCAATTGCAGGCAACCAGTGTACCTCATCCTGTCTCCAGGCCAC | |
| | TGAATAACACCCAAAAGAGCAAGCAGCCCCTGCCATCGGCACCTGAAAATAATCCTGAGGAGGAACTGGC | |
| | ATCAAAACAGAAAAATGAAGAATCAAAAAAGAGGCAGTGGGCTTTGGAAGACTTTGAAATTGGTCGCCCT | |
| | CTGGGTAAAGGAAAGTTTGGTAATGTTTATTTGGCAAGAGAAAAGCAAAGCAAGTTTATTCTGGCTCTTA | |
| | AAGTGTTATTTAAAGCTCAGCTGGAGAAAGCCGGAGTGGAGCATCAGCTCAGAAGAGAAGTAGAAATACA | |
| | GTCCCACCTTCGGCATCCTAATATTCTTAGACTGTATGGTTATTTCCATGATGCTACCAGAGTCTACCTA | |
| | ATTCTGGAATATGCACCACTTGGAACAGTTTATAGAGAACTTCAGAAACTTTCAAAGTTTGATGAGCAGA | |
| | GAACTGCTACTTATATAACAGAATTGGCAAATGCCCTGTCTTACTGTCATTCGAAGAGAGTTATTCATAG | |
| | AGACATTAAGCCAGAGAACTTACTTCTTGGATCAGCTGGAGAGCTTAAAATTGCAGATTTTGGGTGGTCA | |
| | GTACATGCTCCATCTTCCAGGAGGACCACTCTCTGTGGCACCCTGGACTACCTGCCCCCTGAAATGATTG | |
| | AAGGTCGGATGCATGATGAGAAGGTGGATCTCTGGAGCCTTGGAGTTCTTTGCTATGAATTTTTAGTTGG | |
| | GAAGCCTCCTTTTGAGGCAAACACATACCAAGAGACCTACAAAAGAATATCACGGGTTGAATTCACATTC | |
| | CCTGACTTTGTAACAGAGGGAGCCAGGGACCTCATTTCAAGACTGTTGAAGCATAATCCCAGCCAGAGGC | |
| | CAATGCTCAGAGAAGTACTTGAACACCCCTGGATCACAGCAAATTCATCAAAACCATCAAATTGCCAAAA | |
| | CAAAGAATCAGCTAGCAAACAGTCTTAGGAATCGTGCAGGGGGAGAAATCCTTGAGCCAGGGCTGCCATA | |
| | TAACCTGACAGGAACATGCTACTGAAGTTTATTTTACCATTGACTGCTGCCCTCAATCTAGAACGCTACA | |
| | CAAGAAATATTTGTTTTACTCAGCAGGTGTGCCTTAACCTCCCTATTCAGAAAGCTCCACATCAATAAAC | |
| | ATGACACTCTGAAGTGAAAGTAGCCACGAGAATTGTGCTACTTATACTGGTTCATAATCTGGAGGCAAGG | |
| | TTCGACTGCAGCCGCCCCGTCAGCCTGTGCTAGGCATGGTGTCTTCACAGGAGGCAAATCCAGAGCCTGG | |
| | CTGTGGGGAAAGTGACCACTCTGCCCTGACCCCGATCAGTTAAGGAGCTGTGCAATAACCTTCCTAGTAC | |
| | CTGAGTGAGTGTGTAACTTATTGGGTTGGCGAAGCCTGGTAAAGCTGTTGGAATGAGTATGTGATTCTTT | |
| | TTAAGTATGAAAATAAAGATATATGTACAGACTTGTATTTTTTCTCTGGTGGCATTCCTTTAGGAATGCT | |
| | GTGTGTCTGTCCGGCACCCCGGTAGGCCTGATTGGGTTTCTAGTCCTCCTTAACCACTTATCTCCCATAT | |
| | GAGAGTGTGAAAAATAGGAACACGTGCTCTACCTCCATTTAGGGATTTGCTTGGGATACAGAAGAGGCCA | |
| | TGTGTCTCAGAGCTGTTAAGGGCTTATTTTTTTAAAACATTGGAGTCATAGCATGTGTGTAAACTTTAAA | |
| | TATGCAAATAAATAAGTATCTATGTCTAAAAAAA | |
| ACTR3B | AGCATCCGGGCTCCCGGCAGCGGCGCTGCGGCGGCTCGCGGGAGACGCTGCGCGCGGGGCTAGCGGGCGG | 134 |
| NM_020445.5 | CGGAGCGGACGGCGACGGGGCGCTCTCGGGCTGCCGGCGGGGCCGAGCGCCGCGCGTCCCGAGCATGGCA | |
| | GGCTCCCTGCCTCCCTGCGTGGTGGACTGTGGCACCGGGTATACCAAGCTTGGCTACGCAGGCAACACTG | |
| | AGCCCCAGTTCATTATTCCTTCATGTATTGCCATCAGAGAGTCAGCAAAGGTAGTTGACCAAGCTCAAAG | |
| | GAGAGTGTTGAGGGGAGTTGATGACCTTGACTTTTTCATAGGAGATGAAGCCATCGATAAACCTACATAT | |
| | GCTACAAAGTGGCCGATACGACATGGAATCATTGAAGACTGGGATCTTATGGAAAGGTTCATGGAGCAAG | |
| | TGGTTTTTAAATATCTTCGAGCTGAACCTGAGGACCATTATTTTTTAATGACAGAACCTCCACTCAATAC | |
| | ACCAGAAAACAGAGAGTATCTTGCAGAAATTATGTTTGAATCATTTAACGTACCAGGACTCTACATTGCA | |
| | GTTCAGGCAGTGCTGGCCTTGGCGGCATCTTGGACATCTCGACAAGTGGGTGAACGTACGTTAACGGGGA | |
| | TAGTCATTGACAGCGGAGATGGAGTCACCCATGTTATCCCAGTGGCAGAAGGTTATGTAATTGGAAGCTG | |
| | CATCAAACACATCCCGATTGCAGGTAGAGATATTACGTATTTCATTCAACAGCTGCTAAGGGAGAGGGAG | |
| | GTGGGAATCCCTCCTGAGCAGTCACTGGAGACCGCAAAAGCCATTAAGGAGAAATACTGTTACATTTGCC | |
| | CCGATATAGTCAAGGAATTTGCCAAGTATGATGTGGATCCCCGGAAGTGGATCAAACAGTACACGGGTAT | |
| | CAATGCGATCAACCAGAAGAAGTTTGTTATAGACGTTGGTTACGAAAGATTCCTGGGACCTGAAATATTC | |
| | TTTCACCCGGAGTTTGCCAACCCAGACTTTATGGAGTCCATCTCAGATGTTGTTGATGAAGTAATACAGA | |
| | ACTGCCCCATCGATGTGCGGCGCCCGCTGTATAAGAATGTCGTACTCTCAGGAGGCTCCACCATGTTCAG | |
| | GGATTTCGGACGCCGACTGCAGAGGGATTTGAAGAGAGTGGTGGATGCTAGGCTGAGGCTCAGCGAGGAG | |
| | CTCAGCGGCGGGAGGATCAAGCCGAAGCCTGTGGAGGTCCAGGTGGTCACGCATCACATGCAGCGCTACG | |
| | CCGTGTGGTTCGGAGGCTCCATGCTGGCCTCGACTCCCGAGTTCTTTCAGGTCTGCCACACCAAGAAGGA | |
| | CTATGAAGAGTACGGGCCCAGCATCTGCCGCCACAACCCCGTCTTTGGAGTCATGTCCTAGTGTCTGCCT | |
| | GAACGCGTCGTTCGATGGTGTCACGTTGGGGAACAAGTGTCCTTCAGAACCCAGAGAAGGCCGCCGTTCT | |
| | GTAAATAGCGACGTCGGTGTTGCTGCCCAGCAGCGTGCTTGCATTGCCGGTGCATGAGGCGCGGCGCGGG | |
| | CCCTTCAGTAAAAGCCATTTATCCGTGTGCCGACCGCTGTCTGCCAGCCTCCTCCTTCTCCCGCCCTCCT | |
| | CACCCTCGCTCTCCCTCCTCCTCCTCCTCCGAGCTGCTAGCTGACAAATACAATTCTGAAGGAATCCAAA | |
| | TGTGACTTTGAAAATTGTTAGAGAAAACAACATTAGAAAATGGCGCAAAATCGTTAGGTCCCAGGAGAGA | |
| | ATGTGGGGGCGCAAACCCTTTTCCTCCCAGCCTATTTTTGTAAATAAAATGTTTAAACTTGAAATACAAA | |
| | TCGATGTTTATATTTCCTATCATTTTGTATTTTATGGTATTTGGTACAACTGGCTGATACTAAGCACGAA | |
| | TAGATATTGATGTTATGGAGTGCTGTAATCCAAAGTTTTTAATTGTGAGGCATGTTCTGATATGTTTATA | |
| | GGCAAACAAATAAAACAGCAAACTTTTTTGCCACATGTTTGCTAGAAAATGATTATACTTTATTGGAGTG | |
| | ACATGAAGTTTGAACACTAAACAGTAATGTATGAGAATTACTACAGATACATGTATCTTTTAGTTTTTTT | |
| | TGTTTGAACTTTCTGGAGCTGTTTTATAGAAGATGATGGTTTGTTGTCGGTGAGTGTTGGATGAAATACT | |
| | TCCTTGCACCATTGTAATAAAAGCTGTTAGAATATTTGTAAATATCTAAAAAA | |
| TCF7L1 | GGGGAGCCCTAGGCTCGGCGCTGCCGGAGGGGCCCGAGCCGAGCCGCCTGCGCCCCGGCCGGGCAGCGCC | 135 |
| NM_031283.2 | GGGCCCGCTTCCCGCGGGGCCACGCCCTGTCAAACTTTGTTGCGGCGGCTAGCGCAGCGGGCCCGCAAGC | |
| | GGGCGGGAGGGGCGCCGGGCCGGGCCGGGCAGGGCGCGGGCGGCTAGGGGCTCCGAGAGCGGCGGCCCCG | |
| | GCCCGCGGCCCCACCATGCCCCAGCTCGGCGGCGGGGGCGGCGGCGGCGGCGGCGGCAGCGGGGGAGGCG | |
| | GCGGCTCCAGCGCCGGGGCGGCCGGCGGAGGGGACGACCTCGGGGCGAACGACGAGCTGATCCCCTTCCA | |
| | GGACGAGGGGGGCGAGGAGCAGGAGCCGAGCAGCGATAGCGCCTCGGCGCAGCGGGACCTAGACGAGGTC | |
| | AAGTCGTCCCTGGTCAACGAGTCGGAGAACCAGAGCAGCAGCTCGGACTCGGAGGCGGAGAGGCGCCCGC | |
| | AGCCCGTCCGGGACACTTTCCAGAAGCCGCGGGACTATTTCGCCGAAGTGAGAAGGCCTCAGGACAGCGC | |
| | GTTCTTTAAAGGACCCCCGTACCCTGGGTACCCCTTCCTGATGATCCCGGACCTGAGCAGCCCGTACCTC | |
| | TCCAACGGACCCCTGTCTCCCGGAGGAGCGCGCACCTACCTGCAGATGAAATGGCCCCTCCTCGATGTCC | |
| | CCTCCAGCGCCACAGTCAAGGACACGAGGTCACCATCTCCAGCACACTTGTCTAATAAAGTTCCTGTCGT | |
| | TCAGCACCCGCATCACATGCATCCGCTGACTCCCCTCATCACCTACAGCAATGACCACTTCTCCCCCGGC | |
| | TCCCCTCCCACCCACCTCTCCCCAGAGATCGATCCAAAGACAGGAATCCCCCGGCCCCCTCACCCATCCG | |
| | AGCTGTCACCGTATTACCCACTCTCTCCCGGAGCTGTCGGACAAATCCCCCACCCCCTCGGCTGGCTCGT | |
| | CCCACAGCAAGGCCAGCCCATGTACTCCCTTCCTCCCGGTGGCTTCCGGCACCCTTACCCCGCCCTCGCC | |
| | ATGAACGCCTCGATGTCCAGCCTGGTCTCCAGTCGGTTCTCTCCTCACATGGTGGCTCCTGCCCACCCTG | |
| | GCCTGCCCACCTCAGGGATCCCCCACCCTGCCATCGTCTCCCCCATCGTCAAGCAGGAACCGGCACCCCC | |
| | CAGCCTGAGCCCTGCAGTGAGCGTGAAATCACCAGTCACCGTGAAAAAGGAGGAGGAAAAGAAGCCCCAC | |
| | GTGAAGAAGCCTCTGAATGCCTTCATGTTGTATATGAAGGAGATGAGGGCCAAGGTGGTGGCTGAGTGCA | |
| | CCCTGAAGGAAAGTGCAGCCATTAACCAGATCCTTGGAAGAAAGTGGCACAACCTGTCTCGAGAAGAACA | |
| | GGCCAAGTACTACGAGCTGGCCCGGAAGGAGCGGCAGCTTCACTCGCAGCTCTACCCAACCTGGTCAGCC | |
| | CGGGACAACTATGGTAAGAAAAAGAAGAGGAAGAGAGAAAAGCAGCTGTCCCAGACACAGTCACAGCAGC | |
| | AAGTCCAGGAGGCAGAGGGTGCCCTGGCCTCCAAGAGCAAGAAGCCATGTGTTCAGTACCTGCCCCCCGA | |
| | GAAGCCCTGTGACAGCCCTGCCTCCTCCCACGGGAGCATGCTGGACTCCCCGGCCACTCCCTCTGCAGCT | |
| | TTGGCCTCACCAGCTGCCCCTGCTGCCACCCATTCGGAGCAAGCCCAGCCCCTCTCCCTCACCACCAAAC | |
| | CAGAAACCCGGGCCCAGCTGGCTCTCCACTCTGCCGCCTTCCTGTCGGCTAAGGCTGCAGCCTCCTCCTC | |
| | TGGGCAGATGGGCAGCCAGCCTCCCCTCCTGTCCCGGCCCCTCCCCCTTGGGTCCATGCCCACAGCTCTG | |
| | CTGGCCTCTCCCCCGTCCTTCCCCGCCACGCTCCATGCCCACCAGGCCCTCCCGGTGCTACAGGCCCAGC | |
| | CTCTTTCCCTGGTCACCAAGTCTGCCCACTAAGCTCCCCCCGACCCCTGCAGGCTGTCACATGACTCATT | |
| | GAGTAGTAATGATTCAGAAGAAAAAGAAAAAGGAGACTTTATTGGTCAATATTTGACCACTCTGGACTGT | |
| | TCTGTAAAGTGGCTGGTAACAACAGCACTTTACAGTTTGTAGATGTAACCAGTAGCTGATCTTAAGGCTT | |
| | TTTTAAAAAACAAAACAAAACAACAAAAAAAAATCTTTATAAGAAAGAGAACTGAAAAGTAGCGTGCTAT | |
| | TCGTCCTGTAGGTGCTGTGGTGGATGGACCTGGGCAGAGGGCACTTCTCTCTCTTACCTCTCTTGCACTT | |
| | TCTGTCTCCTGTCTCTTCTCGCCCCTGCCGCCTGCCCCAGCTTCCCCGACTCCATCTGCAGCTCTGCCAT | |
| | TGTGACATTTCCTGTTACCCAGCCCAAGTTTTCATCGTCTGCTCAATACCGTGGGTTCTTCTTCGTCCTC | |
| | TGTCCTCTGCCCAGTGTGAGGCCATCACCATGTGAGAAGACATCTTGGCCTGATTTGCTGCCACCAGCGT | |
| | CCCCTCCCTCAGTGGGCCCGAACTCGCCAGCCCCAGCTTTCAGTGGAGAAAGCGGTCCTCTGAAATGGTT | |
| | TCCTCCCAACCCCCGCATTTAAAGGGACTCAAGGTGCCTGCCACTTCCTCAGCGAAGAAGTCTGTGTTCC | |
| | TCCCCGTCCTTGCCAGTGGCGATCATCCCTTCACAATCCCAGAGTGGCAGGCGGGACCGGCCCCATGGTC | |
| | TGGCTCCTGTCACCTGGGTCCGTGCCAGCACAATCTGCCAAAGTTCTAGAGACCCTGTTCCCTTCCCCAT | |
| | CACCTCACATGCTTCTTCTGTGTGTATTTCTTTTTGTTTTTATGGTTTTTGGAGCAATTTAAACTCCCAG | |
| | TTGTTTATTTTCACAAAAGAAAATAAAATTGCAGTTGCAAGACCTTTTAAAAAAAAAAAAAA | |
| MYBL2 | GCGCTTGGCGGGAGATAGAAAAGTGCTTCAACCCGCGCCGGCGGCGACTGCAGTTCCTGCGAGCGAGGAG | 136 |
| NM_002466.2 | CGCGGGACCTGCTGACACGCTGACGCCTTCGAGCGCGGCCCGGGGCCCGGAGCGGCCGGAGCAGCCCGGG | |
| | TCCTGACCCCGGCCCGGCTCCCGCTCCGGGCTCTGCCGGCGGGCGGGCGAGCGCGGCGCGGTCCGGGCCG | |
| | GGGGGATGTCTCGGCGGACGCGCTGCGAGGATCTGGATGAGCTGCACTACCAGGACACAGATTCAGATGT | |
| | GCCGGAGCAGAGGGATAGCAAGTGCAAGGTCAAATGGACCCATGAGGAGGACGAGCAGCTGAGGGCCCTG | |
| | GTGAGGCAGTTTGGACAGCAGGACTGGAAGTTCCTGGCCAGCCACTTCCCTAACCGCACTGACCAGCAAT | |
| | GCCAGTACAGGTGGCTGAGAGTTTTGAATCCAGACCTTGTCAAGGGGCCATGGACCAAAGAGGAAGACCA | |
| | AAAAGTCATCGAGCTGGTTAAGAAGTATGGCACAAAGCAGTGGACACTGATTGCCAAGCACCTGAAGGGC | |
| | CGGCTGGGGAAGCAGTGCCGTGAACGCTGGCACAACCACCTCAACCCTGAGGTGAAGAAGTCTTGCTGGA | |
| | CCGAGGAGGAGGACCGCATCATCTGCGAGGCCCACAAGGTGCTGGGCAACCGCTGGGCCGAGATCGCCAA | |
| | GATGTTGCCAGGGAGGACAGACAATGCTGTGAAGAATCACTGGAACTCTACCATCAAAAGGAAGGTGGAC | |
| | ACAGGAGGCTTCTTGAGCGAGTCCAAAGACTGCAAGCCCCCAGTGTACTTGCTGCTGGAGCTCGAGGACA | |
| | AGGACGGCCTCCAGAGTGCCCAGCCCACGGAAGGCCAGGGAAGTCTTCTGACCAACTGGCCCTCCGTCCC | |
| | TCCTACCATAAAGGAGGAGGAAAACAGTGAGGAGGAACTTGCAGCAGCCACCACATCGAAGGAACAGGAG | |
| | CCCATCGGTACAGATCTGGACGCAGTGCGAACACCAGAGCCCTTGGAGGAATTCCCGAAGCGTGAGGACC | |
| | AGGAAGGCTCCCCACCAGAAACGAGCCTGCCTTACAAGTGGGTGGTGGAGGCAGCTAACCTCCTCATCCC | |
| | CGCTGTGGGTTCTAGCCTCTCTGAAGCCCTGGACTTGATCGAGTCGGACCCTGATGCTTGGTGTGACCTG | |
| | AGTAAATTTGACCTCCCTGAGGAACCATCTGCAGAGGACAGTATCAACAACAGCCTAGTGCAGCTGCAAG | |
| | CGTCACATCAGCAGCAAGTCCTGCCACCCCGCCAGCCTTCCGCCCTGGTGCCCAGTGTGACCGAGTACCG | |
| | CCTGGATGGCCACACCATCTCAGACCTGAGCCGGAGCAGCCGGGGCGAGCTGATCCCCATCTCCCCCAGC | |
| | ACTGAAGTCGGGGGCTCTGGCATTGGCACACCGCCCTCTGTGCTCAAGCGGCAGAGGAAGAGGCGTGTGG | |
| | CTCTGTCCCCTGTCACTGAGAATAGCACCAGTCTGTCCTTCCTGGATTCCTGTAACAGCCTCACGCCCAA | |
| | GAGCACACCTGTTAAGACCCTGCCCTTCTCGCCCTCCCAGTTTCTGAACTTCTGGAACAAACAGGACACA | |
| | TTGGAGCTGGAGAGCCCCTCGCTGACATCCACCCCAGTGTGCAGCCAGAAGGTGGTGGTCACCACACCAC | |
| | TGCACCGGGACAAGACACCCCTGCACCAGAAACATGCTGCGTTTGTAACCCCAGATCAGAAGTACTCCAT | |
| | GGACAACACTCCCCACACGCCAACCCCGTTCAAGAACGCCCTGGAGAAGTACGGACCCCTGAAGCCCCTG | |
| | CCACAGACCCCGCACCTGGAGGAGGACTTGAAGGAGGTGCTGCGTTCTGAGGCTGGCATCGAACTCATCA | |
| | TCGAGGACGACATCAGGCCCGAGAAGCAGAAGAGGAAGCCTGGGCTGCGGCGGAGCCCCATCAAGAAAGT | |
| | CCGGAAGTCTCTGGCTCTTGACATTGTGGATGAGGATGTGAAGCTGATGATGTCCACACTGCCCAAGTCT | |
| | CTATCCTTGCCGACAACTGCCCCTTCAAACTCTTCCAGCCTCACCCTGTCAGGTATCAAAGAAGACAACA | |
| | GCTTGCTCAACCAGGGCTTCTTGCAGGCCAAGCCCGAGAAGGCAGCAGTGGCCCAGAAGCCCCGAAGCCA | |
| | CTTCACGACACCTGCCCCTATGTCCAGTGCCTGGAAGACGGTGGCCTGCGGGGGGACCAGGGACCAGCTT | |
| | TTCATGCAGGAGAAAGCCCGGCAGCTCCTGGGCCGCCTGAAGCCCAGCCACACATCTCGGACCCTCATCT | |
| | TGTCCTGAGGTGTTGAGGGTGTCACGAGCCCATTCTCATGTTTACAGGGGTTGTGGGGGCAGAGGGGGTC | |
| | TGTGAATCTGAGAGTCATTCAGGTGACCTCCTGCAGGGAGCCTTCTGCCACCAGCCCCTCCCCAGACTCT | |
| | CAGGTGGAGGCAACAGGGCCATGTGCTGCCCTGTTGCCGAGCCCAGCTGTGGGCGGCTCCTGGTGCTAAC | |
| | AACAAAGTTCCACTTCCAGGTCTGCCTGGTTCCCTCCCCAAGGCCACAGGGAGCTCCGTCAGCTTCTCCC | |
| | AAGCCCACGTCAGGCCTGGCCTCATCTCAGACCCTGCTTAGGATGGGGGATGTGGCCAGGGGTGCTCCTG | |
| | TGCTCACCCTCTCTTGGTGCATTTTTTTGGAAGAATAAAATTGCCTCTCTCTTAAAAAAAAAAAAAAAAA | |
| | A | |
| CELSR1 | ATGGCGCCGCCGCCGCCGCCCGTGCTGCCCGTGCTGCTGCTCCTGGCCGCCGCCGCCGCCCTGCCGGCGA | 137 |
| NM_014246.1 | TGGGGCTGCGAGCGGCCGCCTGGGAGCCGCGCGTACCCGGCGGGACCCGCGCCTTCGCCCTCCGGCCCGG | |
| | CTGTACCTACGCGGTGGGCGCCGCTTGCACGCCCCGGGCGCCGCGGGAGCTGCTGGACGTGGGCCGCGAT | |
| | GGGCGGCTGGCAGGACGTCGGCGCGTCTCGGGCGCGGGGCGCCCGCTGCCGCTGCAAGTCCGCTTGGTGG | |
| | CCCGCAGTGCCCCGACGGCGCTGAGCCGCCGCCTGCGGGCGCGCACGCACCTTCCCGGCTGCGGAGCCCG | |
| | TGCCCGGCTCTGCGGAACCGGTGCCCGGCTCTGCGGGGCGCTCTGCTTCCCCGTCCCCGGCGGCTGCGCG | |
| | GCCGCGCAGCATTCGGCGCTCGCAGCTCCGACCACCTTACCCGCCTGCCGCTGCCCGCCGCGCCCCAGGC | |
| | CCCGCTGTCCCGGCCGTCCCATCTGCCTGCCGCCGGGCGGCTCGGTCCGCCTGCGTCTGCTGTGCGCCCT | |
| | GCGGCGCGCGGCTGGCGCCGTCCGGGTGGGACTGGCGCTGGAGGCCGCCACCGCGGGGACGCCCTCCGCG | |
| | TCGCCATCCCCATCGCCGCCCCTGCCGCCGAACTTGCCCGAAGCCCGGGCGGGGCCGGCGCGACGGGCCC | |
| | GGCGGGGCACGAGCGGCAGAGGGAGCCTGAAGTTTCCGATGCCCAACTACCAGGTGGCGTTGTTTGAGAA | |
| | CGAACCGGCGGGCACCCTCATCCTCCAGCTGCACGCGCACTACACCATCGAGGGCGAGGAGGAGCGCGTG | |
| | AGCTATTACATGGAGGGGCTGTTCGACGAGCGCTCCCGGGGCTACTTCCGAATCGACTCTGCCACGGGCG | |
| | CCGTGAGCACGGACAGCGTACTGGACCGCGAGACCAAGGAGACGCACGTCCTCAGGGTGAAAGCCGTGGA | |
| | CTACAGTACGCCGCCGCGCTCGGCCACCACCTACATCACTGTCTTGGTCAAAGACACCAACGACCACAGC | |
| | CCGGTCTTCGAGCAGTCGGAGTACCGCGAGCGCGTGCGGGAGAACCTGGAGGTGGGCTACGAGGTGCTGA | |
| | CCATCCGCGCCAGCGACCGCGACTCGCCCATCAACGCCAACTTGCGTTACCGCGTGTTGGGGGGCGCGTG | |
| | GGACGTCTTCCAGCTCAACGAGAGCTCTGGCGTGGTGAGCACACGGGCGGTGCTGGACCGGGAGGAGGCG | |
| | GCCGAGTACCAGCTCCTGGTGGAGGCCAACGACCAGGGGCGCAATCCGGGCCCGCTCAGTGCCACGGCCA | |
| | CCGTGTACATCGAGGTGGAGGACGAGAACGACAACTACCCCCAGTTCAGCGAGCAGAACTACGTGGTCCA | |
| | GGTGCCCGAGGACGTGGGGCTCAACACGGCTGTGCTGCGAGTGCAGGCCACGGACCGGGACCAGGGCCAG | |
| | AACGCGGCCATTCACTACAGCATCCTCAGCGGGAACGTGGCCGGCCAGTTCTACCTGCACTCGCTGAGCG | |
| | GGATCCTGGATGTGATCAACCCCTTGGATTTCGAGGATGTCCAGAAATACTCGCTGAGCATTAAGGCCCA | |
| | GGATGGGGGCCGGCCCCCGCTCATCAATTCTTCAGGGGTGGTGTCTGTGCAGGTGCTGGATGTCAACGAC | |
| | AACGAGCCTATCTTTGTGAGCAGCCCCTTCCAGGCCACGGTGCTGGAGAATGTGCCCCTGGGCTACCCCG | |
| | TGGTGCACATTCAGGCGGTGGACGCGGACTCTGGAGAGAACGCCCGGCTGCACTATCGCCTGGTGGACAC | |
| | GGCCTCCACCTTTCTGGGGGGCGGCAGCGCTGGGCCTAAGAATCCTGCCCCCACCCCTGACTTCCCCTTC | |
| | CAGATCCACAACAGCTCCGGTTGGATCACAGTGTGTGCCGAGCTGGACCGCGAGGAGGTGGAGCACTACA | |
| | GCTTCGGGGTGGAGGCGGTGGACCACGGCTCGCCCCCCATGAGCTCCTCCACCAGCGTGTCCATCACGGT | |
| | GCTGGACGTGAATGACAACGACCCGGTGTTCACGCAGCCCACCTACGAGCTTCGTCTGAATGAGGATGCG | |
| | GCCGTGGGGAGCAGCGTGCTGACCCTGCAGGCCCGCGACCGTGACGCCAACAGTGTGATTACCTACCAGC | |
| | TCACAGGCGGCAACACCCGGAACCGCTTTGCACTCAGCAGCCAGAGAGGGGGCGGCCTCATCACCCTGGC | |
| | GCTACCTCTGGACTACAAGCAGGAGCAGCAGTACGTGCTGGCGGTGACAGCATCCGACGGCACACGGTCG | |
| | CACACTGCGCATGTCCTAATCAACGTCACTGATGCCAACACCCACAGGCCTGTCTTTCAGAGCTCCCATT | |
| | ACACAGTGAGTGTCAGTGAGGACAGGCCTGTGGGCACCTCCATTGCTACCCTCAGTGCCAACGATGAGGA | |
| | CACAGGAGAGAATGCCCGCATCACCTACGTGATTCAGGACCCCGTGCCGCAGTTCCGCATTGACCCCGAC | |
| | AGTGGCACCATGTACACCATGATGGAGCTGGACTATGAGAACCAGGTCGCCTACACGCTGACCATCATGG | |
| | CCCAGGACAACGGCATCCCGCAGAAATCAGACACCACCACCCTAGAGATCCTCATCCTCGATGCCAATGA | |
| | CAATGCACCCCAGTTCCTGTGGGATTTCTACCAGGGTTCCATCTTTGAGGATGCTCCACCCTCGACCAGC | |
| | ATCCTCCAGGTCTCTGCCACGGACCGGGACTCAGGTCCCAATGGGCGTCTGCTGTACACCTTCCAGGGTG | |
| | GGGACGACGGCGATGGGGACTTCTACATCGAGCCCACGTCCGGTGTGATTCGCACCCAGCGCCGGCTGGA | |
| | CCGGGAGAATGTGGCCGTGTACAACCTTTGGGCTCTGGCTGTGGATCGGGGCAGTCCCACTCCCCTTAGC | |
| | GCCTCGGTAGAAATCCAGGTGACCATCTTGGACATTAATGACAATGCCCCCATGTTTGAGAAGGACGAAC | |
| | TGGAGCTGTTTGTTGAGGAGAACAACCCAGTGGGGTCGGTGGTGGCAAAGATTCGTGCTAACGACCCTGA | |
| | TGAAGGCCCTAATGCCCAGATCATGTATCAGATTGTGGAAGGGGACATGCGGCATTTCTTCCAGCTGGAC | |
| | CTGCTCAACGGGGACCTGCGTGCCATGGTGGAGCTGGACTTTGAGGTCCGGCGGGAGTATGTGCTGGTGG | |
| | TGCAGGCCACGTCGGCTCCGCTGGTGAGCCGAGCCACGGTGCACATCCTTCTCGTGGACCAGAATGACAA | |
| | CCCGCCTGTGCTGCCCGACTTCCAGATCCTCTTCAACAACTATGTCACCAACAAGTCCAACAGTTTCCCC | |
| | ACCGGCGTGATCGGCTGCATCCCGGCCCATGACCCCGACGTGTCAGACAGCCTCAACTACACCTTCGTGC | |
| | AGGGCAACGAGCTGCGCCTGTTGCTGCTGGACCCCGCCACGGGCGAACTGCAGCTCAGCCGCGACCTGGA | |
| | CAACAACCGGCCGCTGGAGGCGCTCATGGAGGTGTCTGTGTCTGATGGCATCCACAGCGTCACGGCCTTC | |
| | TGCACCCTGCGTGTCACCATCATCACGGACGACATGCTGACCAACAGCATCACTGTCCGCCTGGAGAACA | |
| | TGTCCCAGGAGAAGTTCCTGTCCCCGCTGCTGGCCCTCTTCGTGGAGGGGGTGGCCGCCGTGCTGTCCAC | |
| | CACCAAGGACGACGTCTTCGTCTTCAACGTCCAGAACGACACCGACGTCAGCTCCAACATCCTGAACGTG | |
| | ACCTTCTCGGCGCTGCTGCCTGGCGGCGTCCGCGGCCAGTTCTTCCCGTCGGAGGACCTGCAGGAGCAGA | |
| | TCTACCTGAATCGGACGCTGCTGACCACCATCTCCACGCAGCGCGTGCTGCCCTTCGACGACAACATCTG | |
| | CCTGCGCGAGCCCTGCGAGAACTACATGAAGTGCGTGTCCGTTCTGCGATTCGACAGCTCCGCGCCCTTC | |
| | CTCAGCTCCACCACCGTGCTCTTCCGGCCCATCCACCCCATCAACGGCCTGCGCTGCCGCTGCCCGCCCG | |
| | GCTTCACCGGCGACTACTGCGAGACGGAGATCGACCTCTGCTACTCCGACCCGTGCGGCGCCAACGGCCG | |
| | CTGCCGCAGCCGCGAGGGCGGCTACACCTGCGAGTGCTTCGAGGACTTCACTGGAGAGCACTGTGAGGTG | |
| | GATGCCCGCTCAGGCCGCTGTGCCAACGGGGTGTGCAAGAACGGGGGCACCTGCGTGAACCTGCTCATCG | |
| | GCGGCTTCCACTGCGTGTGTCCTCCTGGCGAGTATGAGAGGCCCTACTGTGAGGTGACCACCAGGAGCTT | |
| | CCCGCCCCAGTCCTTCGTCACCTTCCGGGGCCTGAGACAGCGCTTCCACTTCACCATCTCCCTCACGTTT | |
| | GCCACTCAGGAAAGGAACGGCTTGCTTCTCTACAACGGCCGCTTCAATGAGAAGCACGACTTCATCGCCC | |
| | TGGAGATCGTGGACGAGCAGGTGCAGCTCACCTTCTCTGCAGGCGAGACAACAACGACCGTGGCACCGAA | |
| | GGTTCCCAGTGGTGTGAGTGACGGGCGGTGGCACTCTGTGCAGGTGCAGTACTACAACAAGCCCAATATT | |
| | GGCCACCTGGGCCTGCCCCATGGGCCGTCCGGGGAAAAGATGGCCGTGGTGACAGTGGATGATTGTGACA | |
| | CAACCATGGCTGTGCGCTTTGGAAAGGACATCGGGAACTACAGCTGCGCTGCCCAGGGCACTCAGACCGG | |
| | CTCCAAGAAGTCCCTGGATCTGACCGGCCCTCTACTCCTGGGGGGTGTCCCCAACCTGCCAGAAGACTTC | |
| | CCAGTGCACAACCGGCAGTTCGTGGGCTGCATGCGGAACCTGTCAGTCGACGGCAAAAATGTGGACATGG | |
| | CCGGATTCATCGCCAACAATGGCACCCGGGAAGGCTGCGCTGCTCGGAGGAACTTCTGCGATGGGAGGCG | |
| | GTGTCAGAATGGAGGCACCTGTGTCAACAGGTGGAATATGTATCTGTGTGAGTGTCCACTCCGATTCGGC | |
| | GGGAAGAACTGTGAGCAAGCCATGCCTCACCCCCAGCTCTTCAGCGGTGAGAGCGTCGTGTCCTGGAGTG | |
| | ACCTGAACATCATCATCTCTGTGCCCTGGTACCTGGGGCTCATGTTCCGGACCCGGAAGGAGGACAGCGT | |
| | TCTGATGGAGGCCACCAGTGGTGGGCCCACCAGCTTTCGCCTCCAGATCCTGAACAACTACCTCCAGTTT | |
| | GAGGTGTCCCACGGCCCCTCCGATGTGGAGTCCGTGATGCTGTCCGGGTTGCGGGTGACCGACGGGGAGT | |
| | GGCACCACCTGCTGATCGAGCTGAAGAATGTTAAGGAGGACAGTGAGATGAAGCACCTGGTCACCATGAC | |
| | CTTGGACTATGGGATGGACCAGAACAAGGCAGATATCGGGGGCATGCTTCCCGGGCTGACGGTAAGGAGC | |
| | GTGGTGGTCGGAGGCGCCTCTGAAGACAAGGTCTCCGTGCGCCGTGGATTCCGAGGCTGCATGCAGGGAG | |
| | TGAGGATGGGGGGGACGCCCACCAACGTCGCCACCCTGAACATGAACAACGCACTCAAGGTCAGGGTGAA | |
| | GGACGGCTGTGATGTGGACGACCCCTGTACCTCGAGCCCCTGTCCCCCCAATAGCCGCTGCCACGACGCC | |
| | TGGGAGGACTACAGCTGCGTCTGTGACAAAGGGTACCTTGGAATAAACTGTGTGGATGCCTGTCACCTGA | |
| | ACCCCTGCGAGAACATGGGGGCCTGCGTGCGCTCCCCCGGCTCCCCGCAGGGCTACGTGTGCGAGTGTGG | |
| | GCCCAGTCACTACGGGCCGTACTGTGAGAACAAACTCGACCTTCCGTGCCCCAGAGGCTGGTGGGGGAAC | |
| | CCCGTCTGTGGACCCTGCCACTGTGCCGTCAGCAAAGGCTTTGATCCCGACTGTAATAAGACCAACGGCC | |
| | AGTGCCAATGCAAGGAGAATTACTACAAGCTCCTAGCCCAGGACACCTGTCTGCCCTGCGACTGCTTCCC | |
| | CCATGGCTCCCACAGCCGCACTTGCGACATGGCCACCGGGCAGTGTGCCTGCAAGCCCGGCGTCATCGGC | |
| | CGCCAGTGCAACCGCTGCGACAACCCGTTTGCCGAGGTCACCACGCTCGGCTGTGAAGTGATCTACAATG | |
| | GCTGTCCCAAAGCATTTGAGGCCGGCATCTGGTGGCCACAGACCAAGTTCGGGCAGCCGGCTGCGGTGCC | |
| | ATGCCCTAAGGGATCCGTTGGAAATGCGGTCCGACACTGCAGCGGGGAGAAGGGCTGGCTGCCCCCAGAG | |
| | CTCTTTAACTGTACCACCATCTCCTTCGTGGACCTCAGGGCCATGAATGAGAAGCTGAGCCGCAATGAGA | |
| | CGCAGGTGGACGGCGCCAGGGCCCTGCAGCTGGTGAGGGCGCTGCGCAGTGCTACACAGCACACGGGCAC | |
| | GCTCTTTGGCAATGACGTGCGCACGGCCTACCAGCTGCTGGGCCACGTCCTTCAGCACGAGAGCTGGCAG | |
| | CAGGGCTTCGACCTGGCAGCCACGCAGGACGCCGACTTTCACGAGGACGTCATCCACTCGGGCAGCGCCC | |
| | TCCTGGCCCCAGCCACCAGGGCGGCGTGGGAGCAGATCCAGCGGAGCGAGGGCGGCACGGCACAGCTGCT | |
| | CCGGCGCCTCGAGGGCTACTTCAGCAACGTGGCACGCAACGTGCGGCGGACGTACCTGCGGCCCTTCGTC | |
| | ATCGTCACCGCCAACATGATTCTTGCTGTCGACATCTTTGACAAGTTCAACTTTACGGGAGCCAGGGTCC | |
| | CGCGATTCGACACCATCCATGAAGAGTTCCCCAGGGAGCTGGAGTCCTCCGTCTCCTTCCCAGCCGACTT | |
| | CTTCAGACCACCTGAAGAAAAAGAAGGCCCCCTGCTGAGGCCGGCTGGCCGGAGGACCACCCCGCAGACC | |
| | ACGCGCCCGGGGCCTGGCACCGAGAGGGAGGCCCCGATCAGCAGGCGGAGGCGACACCCTGATGACGCTG | |
| | GCCAGTTCGCCGTCGCTCTGGTCATCATTTACCGCACCCTGGGGCAGCTCCTGCCCGAGCGCTACGACCC | |
| | CGACCGTCGCAGCCTCCGGTTGCCTCACCGGCCCATCATTAATACCCCGATGGTGAGCACGCTGGTGTAC | |
| | AGCGAGGGGGCTCCGCTCCCGAGACCCCTGGAGAGGCCCGTCCTGGTGGAGTTCGCCCTGCTGGAGGTGG | |
| | AGGAGCGAACCAAGCCTGTCTGCGTGTTCTGGAACCACTCCCTGGCCGTTGGTGGGACGGGAGGGTGGTC | |
| | TGCCCGGGGCTGCGAGCTCCTGTCCAGGAACCGGACACATGTCGCCTGCCAGTGCAGCCACACAGCCAGC | |
| | TTTGCGGTGCTCATGGATATCTCCAGGCGTGAGAACGGGGAGGTCCTGCCTCTGAAGATTGTCACCTATG | |
| | CCGCTGTGTCCTTGTCACTGGCAGCCCTGCTGGTGGCCTTCGTCCTCCTGAGCCTGGTCCGCATGCTGCG | |
| | CTCCAACCTGCACAGCATTCACAAGCACCTCGCCGTGGCGCTCTTCCTCTCTCAGCTGGTGTTCGTGATT | |
| | GGGATCAACCAGACGGAAAACCCGTTTCTGTGCACAGTGGTTGCCATCCTCCTCCACTACATCTACATGA | |
| | GCACCTTTGCCTGGACCCTCGTGGAGAGCCTGCATGTCTACCGCATGCTGACCGAGGTGCGCAACATCGA | |
| | CACGGGGCCCATGCGGTTCTACTACGTCGTGGGCTGGGGCATCCCGGCCATTGTCACAGGACTGGCGGTC | |
| | GGCCTGGACCCCCAGGGCTACGGGAACCCCGACTTCTGCTGGCTGTCGCTTCAAGACACCCTGATTTGGA | |
| | GCTTTGCGGGGCCCATCGGAGCTGTTATAATCATCAACACAGTCACTTCTGTCCTATCTGCAAAGGTTTC | |
| | CTGCCAAAGAAAGCACCATTATTATGGGAAAAAAGGGATCGTCTCCCTGCTGAGGACCGCATTCCTCCTG | |
| | CTGCTGCTCATCAGCGCCACCTGGCTGCTGGGGCTGCTGGCTGTGAACCGCGATGCACTGAGCTTTCACT | |
| | ACCTCTTCGCCATCTTCAGCGGCTTACAGGGCCCCTTCGTCCTCCTTTTCCACTGCGTGCTCAACCAGGA | |
| | GGTCCGGAAGCACCTGAAGGGCGTGCTCGGCGGGAGGAAGCTGCACCTGGAGGACTCCGCCACCACCAGG | |
| | GCCACCCTGCTGACGCGCTCCCTCAACTGCAACACCACCTTCGGTGACGGGCCTGACATGCTGCGCACAG | |
| | ACTTGGGCGAGTCCACCGCCTCGCTGGACAGCATCGTCAGGGATGAAGGGATCCAGAAGCTCGGCGTGTC | |
| | CTCTGGGCTGGTGAGGGGCAGCCACGGAGAGCCAGACGCGTCCCTCATGCCCAGGAGCTGCAAGGATCCC | |
| | CCTGGCCACGATTCCGACTCAGATAGCGAGCTGTCCCTGGATGAGCAGAGCAGCTCTTACGCCTCCTCAC | |
| | ACTCGTCAGACAGCGAGGACGATGGGGTGGGAGCTGAGGAAAAATGGGACCCGGCCAGGGGCGCCGTCCA | |
| | CAGCACCCCCAAAGGGGACGCTGTGGCCAACCACGTTCCGGCCGGCTGGCCCGACCAGAGCCTGGCTGAG | |
| | AGTGACAGTGAGGACCCCAGCGGCAAGCCCCGCCTGAAGGTGGAGACCAAGGTCAGCGTGGAGCTGCACC | |
| | GCGAGGAGCAGGGCAGTCACCGTGGAGAGTACCCCCCGGACCAGGAGAGCGGGGGCGCAGCCAGGCTTGC | |
| | TAGCAGCCAGCCCCCAGAGCAGAGGAAAGGCATCTTGAAAAATAAAGTCACCTACCCGCCGCCGCTGACG | |
| | CTGACGGAGCAGACGCTGAAGGGCCGGCTCCGGGAGAAGCTGGCCGACTGTGAGCAGAGCCCCACATCCT | |
| | CGCGCACGTCTTCCCTGGGCTCTGGCGGCCCCGACTGCGCCATCACAGTCAAGAGCCCTGGGAGGGAGCC | |
| | GGGGCGTGACCACCTCAACGGGGTGGCCATGAATGTGCGCACTGGGAGCGCCCAGGCCGATGGCTCCGAC | |
| | TCTGAGAAACCGTGAGGCAAGCCCGTCACCCCACACAGGCTGCGGCATCACCCTCAGACCTTGGAGCCCA | |
| | AGGGGCCACTGCCCTTGAAGTGGAGTGGGCCCAGAGTGTGGCGGTCCCCATGGTGGCAGCCCCCCGACTG | |
| | ATCATCCAGACACAAAGGTCTTGGTTCTCCCAGGAGCTCAGGGCCTGTCAGACCTGGTGACAAGTGCCAA | |
| | AGGCCACAGGCATGAGGGAGGCGTGGACCACTGGGCCAGCACCGCTGAGTCCTAAGACTGCAGTCAAAGC | |
| | CAGAACTGAGAGGGGACCCCAGACTGGGCCCAGAGGCTGGCCAGAGTTCAGGAACGCCGGGCACAGACCA | |
| | AAGACCGCGGTCCAGCCCCGCCCAGGCGGGCATCTCATGGCAGTGCGGACCCGTGGCTGGCAGCCCGGGC | |
| | AGTCCTTTGCAAAGGCACCCCTTGTCTTAAAATCACTTCGCTATGTGGGAAAGGTGGAGATACTTTTATA | |
| | TATTTGTATGGGACTCTGAGGAGGTGCAACCTGTATATATATTGCATTCGTGCTGACTTTGTTATCCCGA | |
| | GAGATCCATGCAATGATCTCTTGCTGTCTTCTCTGTCAAGATTGCACAGTTGTACTTGAATCTGGCATGT | |
| | GTTGACGAAACTGGTGCCCCAGCAGATCAAAGGTGGGAAATACGTCAGCAGTGGGGCTAAAACCAAGCGG | |
| | CTAGAAGCCCTACAGCTGCCTTCGGCCAGGAAGTGAGGATGGTGTGGGCCCTCCCCGCCGGCCCCCTGGG | |
| | TCCCCAGTGTTCGCTGTGTGTGCGTTTGTCCTCTGCTGCCATCTGCCCCGGCTGTGTGAATTCAAGACAG | |
| | GGCAGTGCAGCACTAGGCAGGTGTGAGGAGCCCTGCTGAGGTCACTGTGGGGCACGGTTGCCACACGGCT | |
| | GTCATTTTTCACCTGGTCATTCTGTGACCACCACCCCCTCCCCTCACCGCCTCCCAGGTGGCCCGGGAGC | |
| | TGCAGGTGGGGATGGCTTTGTCCTTTGCTCCTGCTCCCCGTGGGACCTGGGACCTTAAAGCGTTGCAGGT | |
| | TCCTGATTTGGACAGAGGTGTGGGGCCTTCCAGGCCGTTACATACCTCCTGCCAATTCTCTAACTCTCTG | |
| | AGACTGCGAGGATCTCCAGGCAGGGTTCTCCCCTCTGGAGTCTGACCAATTACTTCATTTTGCTTCAAAT | |
| | GGCCAATTGTGCAGAGGGACAAAGCCACAGCCACACTCTTCAACGGTTACCAAACTGTTTTTGGAAATTC | |
| | ACACCAAGGTCGGGCCCACTGCAGGCAGCTGGCACAGCGTGGCCCGAGGGGCTGTGGAACGGGTCCCGGA | |
| | ACTGTCAGACATGTTTGATTTTAGCGTTTCCTTTGTTCTTCAAATCAGGTGCCCAAATAAGTGATCAGCA | |
| | CAGCTGCTTCCAAATAGGAGAAACCATAAAATAGGATGAAAATCAAGTAAAATGCAAAGATGTCCACACT | |
| | GTTTTAAACTTGACCCTGATGAAAATGTGAGCACTGTTAGCAGATGCCTATGGGAGAGGAAAAGCGTATC | |
| | TGAAAATGGTCCAGGACAGGAGGATGAAATGAGATCCCAGAGTCCTCACACCTGAATGAATTATACATGT | |
| | GCCTTACCAGGTGAGTGGTCTTTCGAAGATAAAAAACTCTAGTCCCTTTAAACGTTTGCCCCTGGCGTTT | |
| | CCTAAGTACGAAAAGGTTTTTAAGTCTTCGAACAGTCTCCTTTCATGACTTTAACAGGATTCTGCCCCCT | |
| | GAGGTGTAATTTTTTTGTTCTATTTTTTTCCACGTACTCCACAGCCAACATCACGAGGTGTAATTTTTAA | |
| | TTTGATCAGAACTGTTACCAAAAAACAACTGTCAGTTTTATTGAGATGGGAAAAATGTAAACCTATTTTT | |
| | ATTACTTAAGACTTTATGGGAGAGATTAGACACTGGAGGTTTTTAACAGAACGTGTATTTATTAATGTTC | |
| | AAAACACTGGAATTACAAATGAGAAGAGTCTACAATAAATTAAGATTTTTGAATTTGTACTTCTGCGGTG | |
| | CTGGTTTTTCTCCACAAACACCCCCGCCCCTCCCCATGCCCAGGGTGGCCGTGGAAGGGACGGTTTACGG | |
| | ACGTGCAGCTGAGCTGTCCGTGTCCCATGCTCCCTCAGCCAGTGGAACGTGCCGGAACTTTTTGTCCATT | |
| | CCCTAGTAGGCCTGCCACAGCCTAGATGGGCAGTTTTTGTCTTTCACCAAATTTGAGGACTTTTTTTTTT | |
| | TGCCATTATTTCTTCAGTTTTCTTTTCTTGCACTGATCTTTCTCCTCTCCTTCTGTGACTCCAGTGACTC | |
| | AGACGTTAGACCTCTTGATGTTTTCCCACTGGTCCCTGAGGCTCTGTTC | |
| NTN4 | GGACGGGACGGAGCCGGGGCAGCCAGAAGAGGTGGGAAAAGCGGAGGAGGACGCCCAGGAGGAGGCGGCG | 138 |
| NM_021229.3 | GCGGCGGCCGGGAAGTGAAAGGTCTCGCAAAGTTCAGCGGCGGCTGCGGGCGCCGAGCCCCGGGCTAGCG | |
| | GCAGACGAGCCCGCAGGGCCGCTCCGCGGGGCAGCGCAGCCAGGCCGGCTATGGTCCCGGGGCTCCCGCC | |
| | GCCCCCCAGGTGCCCGGGACCCGCCAGGCCGGTGCGCGAGGGTCACCCCACCTCCCCGCGCGGTCCCGGC | |
| | CCCTGGCTCCCAGCTGCCGGCGACCGCTGACCGAGCCCGGCGCCCCAGGAGGAGGAAGAAACCAGGGCCC | |
| | CGTTCCCTCCCGAGGACGGCGGCGCTTCATCCCGCAGCCCAGAGGTCTCGGCTCCCTCCGGCACCCGCCC | |
| | GGCCCGGCTGCTCCCGGCTCCTCCCGGCCATGGGGAGCTGCGCGCGGCTGCTGCTGCTCTGGGGCTGCAC | |
| | GGTGGTGGCCGCAGGACTGAGTGGAGTAGCTGGAGTGAGTTCCCGCTGTGAAAAAGCCTGCAACCCTCGG | |
| | ATGGGAAATTTGGCTTTGGGGCGAAAACTCTGGGCAGACACCACCTGCGGTCAGAATGCTACCGAACTGT | |
| | ACTGCTTCTACAGTGAGAACACGGATCTGACTTGTCGGCAGCCCAAATGTGACAAGTGCAATGCTGCCTA | |
| | TCCTCACCTGGCTCACCTGCCATCTGCCATGGCAGACTCATCCTTCCGGTTTCCTCGCACATGGTGGCAG | |
| | TCTGCGGAGGATGTGCACAGAGAAAAGATCCAGTTAGACCTGGAAGCTGAATTCTACTTCACTCACCTAA | |
| | TTGTGATGTTCAAGTCCCCCAGGCCGGCTGCCATGGTGCTGGACCGCTCCCAGGACTTTGGGAAAACATG | |
| | GAAGCCTTATAAGTACTTTGCGACTAACTGCTCCGCTACATTTGGCCTGGAAGATGATGTTGTCAAGAAG | |
| | GGCGCTATTTGTACTTCTAAATACTCCAGTCCTTTTCCATGCACTGGAGGAGAGGTTATTTTCAAAGCTT | |
| | TGTCACCACCATACGATACAGAGAACCCTTACAGTGCCAAAGTTCAGGAGCAGCTGAAGATCACCAACCT | |
| | TCGCGTGCAGCTGCTGAAACGACAGTCTTGTCCCTGTCAGAGAAATGACCTGAACGAAGAGCCTCAACAT | |
| | TTTACACACTATGCAATCTATGATTTCATTGTCAAGGGCAGCTGCTTCTGCAATGGCCACGCTGATCAAT | |
| | GCATACCTGTTCATGGCTTCAGACCTGTCAAGGCCCCAGGAACATTCCACATGGTCCATGGGAAGTGTAT | |
| | GTGTAAGCACAACACAGCAGGCAGCCACTGCCAGCACTGTGCCCCGTTATACAATGACCGGCCATGGGAG | |
| | GCAGCTGATGGCAAAACGGGGGCTCCCAACGAGTGCAGAACCTGCAAGTGTAATGGGCATGCTGATACCT | |
| | GTCACTTCGACGTTAATGTGTGGGAGGCATCAGGGAATCGTAGTGGTGGTGTCTGTGATGACTGTCAGCA | |
| | CAACACAGAAGGACAGTATTGCCAGAGGTGCAAGCCAGGCTTCTATCGTGACCTGCGGAGACCCTTCTCA | |
| | GCTCCAGATGCTTGCAAACCGTGTTCCTGCCATCCAGTAGGATCAGCTGTCCTTCCTGCCAACTCAGTGA | |
| | CCTTCTGCGACCCCAGCAATGGTGACTGCCCTTGCAAGCCTGGGGTGGCAGGGCGACGTTGTGACAGGTG | |
| | CATGGTGGGATACTGGGGCTTCGGAGACTATGGCTGTCGACCATGTGACTGTGCGGGGAGCTGTGACCCT | |
| | ATCACCGGAGACTGCATCAGCAGCCACACAGACATAGACTGGTATCATGAAGTTCCTGACTTCCGTCCCG | |
| | TGCACAATAAGAGCGAACCAGCCTGGGAGTGGGAGGATGCGCAGGGGTTTTCTGCACTTCTACACTCAGG | |
| | TAAATGCGAATGTAAGGAACAGACATTAGGAAATGCCAAGGCATTCTGTGGAATGAAATATTCATATGTG | |
| | CTAAAAATAAAGATTTTATCAGCTCATGATAAAGGTACTCATGTTGAGGTCAATGTGAAGATTAAAAAGG | |
| | TCTTAAAATCTACCAAACTGAAGATTTTCCGAGGAAAGCGAACATTATATCCAGAATCATGGACGGACAG | |
| | AGGATGCACTTGTCCAATCCTCAATCCTGGTTTGGAATACCTTGTAGCAGGACATGAGGATATAAGAACA | |
| | GGCAAACTAATTGTGAATATGAAAAGCTTTGTCCAGCACTGGAAACCTTCTCTTGGAAGAAAAGTCATGG | |
| | ATATTTTAAAAAGAGAGTGCAAGTAGCATTAAGATGGATAGCACATAATGGCACTTGTCTATGTACAAAA | |
| | CACAAACTTTAGAGCAAGAAGACCTCAGACAGGAAACTGGAATTTTTTAAAGTGCCAAAACATATAGAAA | |
| | TGTTTGAATGCATGGGTCTTATCTAACTTATCTCTTCTGGACCCATGTTTAAATACAGTTTTATTTCATG | |
| | AAGAGAAATGAAAACCCCTACACTGATATCTGTTTTCTATGGGACTGATTCTGAAATTCTTAACTATTAA | |
| | GAATATTTTAATAGCAGCATGACATTTAGCAGTAATCCATTAAGGGCAGTACCTCTAACAAGGACGCCTT | |
| | CCAGCTTCAGCGATGTTACTTACGTTTGATGCTACTTAAAGTAATGAATGACGTTTTAAGGAATCCCTAA | |
| | CCCTACTATCAGAAAAGGTGTTTGTTAAAGAGCCTTCTCTTGTGTGTTACGCATGAACTTTGGTCTGTAG | |
| | GTGTTAAATGGAACCTCTCCATGTGTATATAGTATTTCCTTGTATAAAGCACTTTACTACCTACCACTTG | |
| | TGTTGTGAACGTTTGGTGACTGCTGTTGAAAGAAGGAAAAGGGTGTGTGAGAAAGCCTACTGAAGCAGCA | |
| | GCACTGCCACTACATGTGGACAAAAGTGACCATATAAAAGAAGTTGTGCTATTTAACTCTGAATACTTGG | |
| | AGAAACTAGGTGAAGATGCAACCAGAAAGGAGAATATGTATGCGTGAAGTCTCAGCTTTGAGCTGGAGGC | |
| | TAGATTCCAAGATGACAGCCATGATGAAACTTTTTAAAAAACTAAACCAGAAGAGACTTTAAAATAAGAG | |
| | AAAGAAATCATAAATGTAGACATATGCTTGGCTAAAGGGGAAATGGACTTTAAATTTTAAAGAGCTCATT | |
| | TGCAATGCACTTGTATACACTTCAAAAATTATTGTAGACACAGAATTTGTTATATTTTTGTGCTTAGTAT | |
| | TTAAACCTGAACATTGAAACAGTTTTCCTCCTTGTCTTTCTTAACAGTAATAGTCATTATATTTACCTGT | |
| | TTTTTAACACAATGTATGTGATAGTCAAAAAATCACAGTTTTTCATTATTATTCATCTTCTGTACCCACG | |
| | CATAACCACTATACATAGTTTCTTTTGTACTTGAATATACAAAACATGAACACAGTGCCATATGAATAAT | |
| | TTCACATACAGAACCTTTTTTTCTCTGAAGTCCTGTGGACTTGCAAATATATATATATATTGCTTTGTTA | |
| | ATTTGTTTTTATATTTCATATATGTAATAAAGGAATATGATCTGAAAAAAAAAAAAAAAAAAAA | |
| SLC16A6 | GGGTGGAGGGCCCGGGCGCTCGGGCCTCACCAGCCCGAGCCAACTTGCGCTAGAGTCGGGCCCGCCCCCT | 139 |
| NM_001174166.1 | AAGGGGTTAATCCTTTTCTCATGTTACCGAGCGGCTTATAAGGAGGGGGAGGCCAAGCCTCCGCCTTATT | |
| | GGGAGCCTTTGGGGGTTTATTCTCTTCCCTTCTAACTTGACAGGGTCTTGCTCTGTCATTCAGGCAAGAG | |
| | TGCAGTAGTGTGATCACTTCTTACTGCCGCCTCAAGCTTCCAGCCTCAACTCAAGCAATCCTCCCACCTC | |
| | AGCCACCCAAGTGGCTGGGACTACAGATTAAGAATGACCCAAAATAAATTAAAGCTTTGTTCCAAAGCCA | |
| | ATGTGTATACTGAAGTGCCTGATGGAGGATGGGGCTGGGCGGTAGCTGTTTCATTTTTCTTCGTTGAAGT | |
| | CTTCACCTACGGCATCATCAAGACATTTGGTGTCTTCTTTAATGACTTAATGGACAGTTTTAATGAATCC | |
| | AATAGCAGGATCTCATGGATAATCTCAATCTGTGTGTTTGTCTTAACATTTTCAGCTCCCCTCGCCACAG | |
| | TCCTGAGCAATCGTTTCGGACACCGTCTGGTAGTGATGTTGGGGGGGCTACTTGTCAGCACCGGGATGGT | |
| | GGCCGCCTCCTTCTCACAAGAGGTTTCTCATATGTACGTCGCCATCGGCATCATCTCTGGTCTGGGATAC | |
| | TGCTTTAGTTTTCTCCCAACTGTAACCATCCTATCACAATATTTTGGCAAAAGACGTTCCATAGTCACTG | |
| | CAGTTGCTTCCACAGGAGAATGTTTCGCTGTGTTTGCTTTCGCACCAGCAATCATGGCTCTGAAGGAGCG | |
| | CATTGGCTGGAGATACAGCCTCCTCTTCGTGGGCCTACTACAGTTAAACATTGTCATCTTCGGAGCACTG | |
| | CTCAGACCCATCTTTATCAGAGGACCAGCGTCACCGAAAATAGTCATCCAGGAAAATCGGAAAGAAGCGC | |
| | AGTATATGCTTGAAAATGAGAAAACACGAACCTCAATAGACTCCATTGACTCAGGAGTAGAACTAACTAC | |
| | CTCACCTAAAAATGTGCCTACTCACACTAACCTGGAACTGGAGCCGAAGGCCGACATGCAGCAGGTCCTG | |
| | GTGAAGACCAGCCCCAGGCCAAGCGAAAAGAAAGCCCCGCTATTAGACTTCTCCATTTTGAAAGAGAAAA | |
| | GTTTTATTTGTTATGCATTATTTGGTCTCTTTGCAACACTGGGATTCTTTGCACCTTCCTTGTACATCAT | |
| | TCCTCTGGGCATTAGTCTGGGCATTGACCAGGACCGCGCTGCTTTTTTATTATCTACGATGGCCATTGCA | |
| | GAAGTTTTCGGAAGGATCGGAGCTGGTTTTGTCCTCAACAGGGAGCCCATTCGTAAGATTTACATTGAGC | |
| | TCATCTGCGTCATCTTATTGACTGTGTCTCTGTTTGCCTTTACTTTTGCTACTGAATTCTGGGGTCTAAT | |
| | GTCATGCAGCATATTTTTTGGGTTTATGGTTGGAACAATAGGAGGGACTCACATTCCACTGCTTGCTGAG | |
| | GATGATGTCGTGGGCATTGAGAAGATGTCTTCTGCAGCTGGGGTCTACATCTTCATTCAGAGCATAGCAG | |
| | GACTGGCTGGACCGCCCCTTGCAGGTTTGTTGGTGGACCAAAGTAAGATCTACAGCAGGGCCTTCTACTC | |
| | CTGCGCAGCTGGCATGGCCCTGGCTGCTGTGTGCCTCGCCCTGGTGAGACCGTGTAAGATGGGACTGTGC | |
| | CAGCATCATCACTCAGGTGAAACAAAGGTAGTGAGCCATCGTGGGAAGACTTTACAGGACATACCTGAAG | |
| | ACTTTCTGGAAATGGATCTTGCAAAAAATGAGCACAGAGTTCACGTGCAAATGGAGCCGGTATGACACAC | |
| | TTTCTTACAACAACAGCCACTGTGTTGGCTGGAGAGGGATGGGGTGGGCCCAACGGGGACACAAGGAGGC | |
| | AGAGGAGCTAACCCCTCTACTCCACTTTCAAAACTACATTTTAAAGGGAATGTGTATGTGAAGAGCACTA | |
| | CCAACATCGCTTTTGTTTTGTTTTGTTTTGTTTTAAGCTTTTTTTTTTTGCTTGTTTTTAAAGCCAAAAC | |
| | AAAAAACAACCAAGCACTCTTCCATATATAAATCTGGCTGTATTCAGTAGCAATACAAGAGATATGTAGA | |
| | AAGACTCTTTGGTTCACATTCCGATATTAAAATAGTGACATGAACTGGCAAAGTGGTTTTAAAAGCTTTC | |
| | ACGTGGGATAAATGATTTTCTTTTTTTCTTTTCTTTCTTCCTATGGTCTTGTCTGAATAAACTACTCTCC | |
| | TGAATAAAACAACATCCAACCCAGGTCATTGAAATGAAATTGGCCAGTCAAAAAAAAAAAGACTTCAATC | |
| | ATTTTTAAAATTCCTAATTTTCAGAAATATGAATAAATAGTTTTTGTTAAACCCTTTGTAAAATACCAAG | |
| | GTTCCCGTTAACAAATTACGGCCTCTGCTTGCTGGAAATGAAATATAGTTTAAGACCAAACATTTTACTA | |
| | ATAAACAAATTTTAAGTATATATATATATATATAACTTGAACTTCATAAATGTGAAGATTACCACTTCTT | |
| | TTTATGGCCAGTCCTTATCAGAAGTGTTTCAGTACAGAATATACAAAATGGCATTTAAAAATGTGTTTCC | |
| | TGTTGCTTTTAGTTATACAGAAATATGTGACTGTAGTGTCTTTAATTTAAACCGCTATTTATTATTAAGT | |
| | TATTCTAGGATGATTAAAGTAATCAAAAGAAATAAAATCTGAGACATAAGCAGCATTTTTACCTCCTTTC | |
| | TGCAATCCTTTAAATGCCTCACAGAATACGTCTTATCTTGTAAAAATACTTTCATAAAAGGCCAAGTTGT | |
| | CATGATTCTTCCATTTGATTAGGGGCAACGTGTGCTATTAAAGGGGAAAAAATAATGGATTGCAAATCGC | |
| | CTTAGCTTTCAAAACTAATTTGTTTTATCATTTAAGAATACTTGAGGAACTTCTTTGATCAGAATTATAT | |
| | TTCAGAGAATTGTTAAAGCATTTCTGATTTAAAGAAAAAACCATCTAATTATTGAAGCATTTCTGTATTT | |
| | CACATGGGGGTAACAGAGACAATTATGTTATAGCGAGTTACAAGTTGCAATTTACATCTTCTATAACACA | |
| | TGACTTGATTGGTCTAAGTTGCCAGAGGTATCGGGTAACTGGTCATTGTTTTGTTTTGTTTGTTTTATTC | |
| | TTCCTTTTTTTTTGGAGTCACACTACATGTATAGTATTGCTCACGTTAGCAGTTTTCTGTAAGGAGGGCA | |
| | AGTGTCAGGATAATAGGTGGACTTTTTACTCACCTATTTTACCACAATCTCACCCTGCAGGTGATGGTCA | |
| | ATGCTTGCTGCTCCATCTTTATTCATCGTTAATGTTAATTTATGACAACTCAGGGGGAAAAACATAACAA | |
| | GCCTAGTTTGGTTACAGGTACACACAAGCTTGAATATTTCTCTGCACTGAAATGAAAGTGGCATAGTTCA | |
| | TCACCACCTGCTACATTTTGTAGAGCATCTTATCAGCCATAGAAATAGGACAATCTATAAAACTTTGGGG | |
| | AGGGTGGGGGAGGAAATGACAAAGTGTCTGTCAAAAACAGGCATAATCTAAAACAAGGTGGATGTAGCAA | |
| | ATCTCTGTCACTGCTTGAGAACTTTGAGCTTGTGGCAGTTTTGCAGACTTACATGACTTCAGCACTTTAC | |
| | GACATATTTTTTACTATGAATGTTCAATACAATTTAATATTTATAACTGATTTCTGAGGGATCTGCTCCA | |
| | TGTCTATTCTGTTATCTGCATGAAAACAAAATGTATGCCAATTTCAGTATGTCAATAATCAAGGTTTTAA | |
| | ATGTTTGGAAGAAAATACAAACAAGATTGCTGATCTGTTCTGTATTAGTGACATTCTGGTACTTCTAGAT | |
| | TTGCAATAAATTTATGGATTTTTTATTTAAAGAGA | |
| C10orf38 | AGGAAGAGGATAAAAGCCAGATCTCCTTTGATAACCTCACTCCAAGTGGGACGCTGGGGAAAGACTACCA | 140 |
| (actually | TAAGTCAGTGGAGGTTTTTCCCTTAAAGGCAAGAAAATCTATGGAAAGAGAAGGCTACGAGTCCTCGGGC | |
| FLJ12884) | AATGATGACTACAGGGGTAGTTACAACACCGTGCTCTCACAGCCTTTATTTGAAAAGCAGGACAGAGAAG | |
| AK022946.1 | GTCCAGCCTCCACGGGAAGCAAACTCACCATTCAGGAACATCTGTACCCCGCGCCTTCATCACCTGAGAA | |
| | AGAACAGCTGCTGGACCGCAGACCCACTGAATGTATGATGTCGCGATCAGTAGATCACCTCGAGAGACCT | |
| | ACGTCCTTCCCACGGCCCGGCCAGTTAATCTGCTGCAGTTCTGTCGACCAGGTCAATGACAGCGTTTACA | |
| | GGAAAGTACTGCCTGCCTTGGTCATCCCGGCTCATTATATGAAACTCCCCGGGGACCACTCCTATGTCAG | |
| | CCAGCCCCTCGTCGTCCCGGCTGATCAGCAGCTTGAGATAGAAAGACTACAGGCTGAGCTGTCCAATCCC | |
| | CATGCCGGGATCTTCCCACACCCGTCCTCACAGATCCAGCCCCAGCCCCTGTCTTCCCAGGCCATCTCTC | |
| | AGCAGCACCTGCAGGATGCGGGCACCCGGGAGTGGAGCCCTCAGAACGCATCCATGTCGGAGTCTCTCTC | |
| | CATCCCAGCTTCCCTGAACGACGCGGCTTTGGCTCAGATGAACAGTGAGGTGCAGCTCCTGACTGAAAAG | |
| | GCCCTGATGGAGCTTGGGGGTGGGAAGCCGCTTCCGCACCCCCGGGCGTGGTTCGTCTCCTTGGATGGCA | |
| | GGTCCAACGCTCACGTTAGACATTCATACGTTGATCTCCAAAGAGCTGGAAGGAACGGAAGTAATGATGC | |
| | CAGTTTGGACTCTGGCGTAGATATGAATGAACCAAAATCAGCCCGGAAGGGAAGGGGAGATGCTTTGTCT | |
| | CTGCAGCAGAACTACCCGCCCGTCCAAGAGCACCAGCAGAAAGAGCCTCGAGCCCCAGACAGCACGGCCT | |
| | ACACGCAGCTCGTGTACCTGGATGACGTGGAACAGAGTGGTAGCGAATGTGGGACCACGGTCTGTACCCC | |
| | CGAGGACAGTGCCCTGCGATGCTTGTTGGAGGGGTCGAGTCGGAGAAGTGGTGGCCAGCTGCCCAGCCTG | |
| | CAGGAGGAGACGACCAGACGGACTGCGGATGCCCCCTCGGAGCCAGCAGCCAGCCCCCACCAGAGAAGAT | |
| | CTGCCCACGAGGAAGAGGAAGACGATGATGATGATGACCAAGGAGAAGACAAGAAAAGCCCCTGGCAGAA | |
| | ACGGGAGGAGAGGCCCCTGATGGCGTTTAACATTAAATGAGCTATCGCAGACCCACCTGACTGTGGAATA | |
| | TAAAATTGCCAAATATCCTTTCTCATGGAAGCGCGTACCCGTTCGTGGAGGAAACGGAACGGCAGCCCAG | |
| | CCGTGGGACGGACGTGGACGTTTACTGCATTCCTGTTTGCCGTGTAAATGTTAGAAAGGAATTAAAGTTA | |
| | TTACTCGGAATAAAGGATGACTTTGGCGGATGTCGCCCCTGCAAGGAGGTGGCTGAAAGTGGTGTCCAGA | |
| | TGTCCTTCCGAGGACTCGGCGTATCCGCCACCAGGGACATTAAGAAACCGCACGTGATGTCGCTATGCTC | |
| | TAACGATCACCTCAGTTCTCCCTCGGATTCTGGGAACAGATGAAACTTTTTGCATCGCTTGAGTCATTTT | |
| | TATCACAATAATCCTACTGTGAAGCTGTCGTTGAGAACTTAGGTTGGCACGTAGCGTCTCAAGGTATGCG | |
| | TTCTCTCAAAGGAAAGCTATGCATCGCTGCTTCGTTGTCTGATTTTGCTTAGATTTTGCTTTGGTTAGGT | |
| | TGCGTTTTGGGGTTTGCCTTTTTTTGTTGTCGCTTAAATGCAATTTGGTTGTAAAGATTTGATTCCTTTG | |
| | TGTTCATCTGTTCCGCTTCTCAGCGGTCCATCTCAGCGTCTCCCTTCAGGAACCGCTGAGTGTCCTCTCT | |
| | TAACATCCAAGCCTTTTAATGAAATCGTACTGAAATCTGTATCAGCTAAGAGTCCTCCAATCCTGGTCCC | |
| | ATTAACTCCAAGTGCCTTTTTGACAGTGACAACAGACAGTCCCTCGCTTTTTGTTGTTGTTGGTTTTCTT | |
| | AACCCCTTTAATGGAACTGCCTGGATTTTATACAGTTATTAAAGGATGTCTCTTTTGCTTTAAACTGCAT | |
| | GCTGCCAAGTGCCATTTGGGGTCAGCATCCTCGTTTCAACACAGTGTGCTCTCTAGTTATCATGTGTAAC | |
| | GTGGGTTCTGTTTAGCGAAGATAGACTAGAGGACACGTTAGAGATGCCCTTCCCTGCTCCATCCCTGTGG | |
| | CACCATTATGGTTTTTTGGCTGTTTGTATATACGGTTACGTATTAACTCTGGAATCCTATGGGCTCATCT | |
| | TGCTCACCCAATGTGGGAGTCTGGTTTGAGCAAGCGAGCTGAATGTGACTATTAAAAAAAATTT | |
| GPR160 | GGCCCGGACGGGACGTGCGCGCTCAAAGGTTGCCCGTCTCTGACGCCCGCATTTCCTGGTCTGGAGCCGG | 141 |
| NM_014373.2 | CTGAGCCACAGCAGGGTCGCCGCGGGGTCCCGGGGCCGTGCTCCCCTGCCCCTCCCGGGAGCGCGCGGGG | |
| | CGGGGCGGGGCGGGGCGGGACCAGGCGGGCGAGCTGGGCCCTCGCCCCTCCCTCGGGCGGTCACCTGGGC | |
| | ACGGGCGCTGCAGGTGTCGGGGCCTCAACCTTGCGGAGCCGACAGCCATCGATCCTCGGGTGGCCTCGAG | |
| | GTGGTGGCAGGGCCGCCCCCTGCAGTCCGGAGACGAACGCACGGACCGGGCCTCCGGAGGCAGGTTCGGC | |
| | TGGAAGGAACCGCTCTCGCTTCGTCCTACACTTGCGCAAATGTCTCCGAGCTTACTCACATAGCATATTG | |
| | GTATATCAAAATGAAATGCAAGGAACCAAAAATAACATAATTGAAGGCAGTAAAAGTGAAATTAAATAGG | |
| | AAGATCATCAGTCAAGGAAGACCCACTGGAGAGGACAGAAAATGAAGCAGTGTTTTATCATGTGTATTTC | |
| | AGCAGGTCTTCTTGAAATTTAACTAAAAATATGACTGCTCTCTCTTCAGAGAACTGCTCTTTTCAGTACC | |
| | AGTTACGTCAAACAAACCAGCCCCTAGATGTTAACTATCTGCTATTCTTGATCATACTTGGGAAAATATT | |
| | ATTAAATATCCTTACACTAGGAATGAGAAGAAAAAACACCTGTCAAAATTTTATGGAATATTTTTGCATT | |
| | TCACTAGCATTCGTTGATCTTTTACTTTTGGTAAACATTTCCATTATATTGTATTTCAGGGATTTTGTAC | |
| | TTTTAAGCATTAGGTTCACTAAATACCACATCTGCCTATTTACTCAAATTATTTCCTTTACTTATGGCTT | |
| | TTTGCATTATCCAGTTTTCCTGACAGCTTGTATAGATTATTGCCTGAATTTCTCTAAAACAACCAAGCTT | |
| | TCATTTAAGTGTCAAAAATTATTTTATTTCTTTACAGTAATTTTAATTTGGATTTCAGTCCTTGCTTATG | |
| | TTTTGGGAGACCCAGCCATCTACCAAAGCCTGAAGGCACAGAATGCTTATTCTCGTCACTGTCCTTTCTA | |
| | TGTCAGCATTCAGAGTTACTGGCTGTCATTTTTCATGGTGATGATTTTATTTGTAGCTTTCATAACCTGT | |
| | TGGGAAGAAGTTACTACTTTGGTACAGGCTATCAGGATAACTTCCTATATGAATGAAACTATCTTATATT | |
| | TTCCTTTTTCATCCCACTCCAGTTATACTGTGAGATCTAAAAAAATATTCTTATCCAAGCTCATTGTCTG | |
| | TTTTCTCAGTACCTGGTTACCATTTGTACTACTTCAGGTAATCATTGTTTTACTTAAAGTTCAGATTCCA | |
| | GCATATATTGAGATGAATATTCCCTGGTTATACTTTGTCAATAGTTTTCTCATTGCTACAGTGTATTGGT | |
| | TTAATTGTCACAAGCTTAATTTAAAAGACATTGGATTACCTTTGGATCCATTTGTCAACTGGAAGTGCTG | |
| | CTTCATTCCACTTACAATTCCTAATCTTGAGCAAATTGAAAAGCCTATATCAATAATGATTTGTTAATAT | |
| | TATTAATTAAAAGTTACAGCTGTCATAAGATCATAATTTTATGAACAGAAAGAACTCAGGACATATTAAA | |
| | AAATAAACTGAACTAAAACAACTTTTGCCCCCTGACTGATAGCATTTCAGAATGTGTCTTTTGAAGGGCT | |
| | ATGATACCAGTTATTAAATAGTGTTTTATTTTAAAAACAAAATAATTCCAAGAAGTTTTTATAGTTATTC | |
| | AGGGACACTATATTACAAATATTACTTTGTTATTAACACAAAAAGTGATAAGAGTTAACATTTGGCTATA | |
| | CTGATGTTTGTGTTACTCAAAAAAACTACTGGATGCAAACTGTTATGTAAATCTGAGATTTCACTGACAA | |
| | CTTTAAGATATCAACCTAAACATTTTTATTAAATGTTCAAATGAAAGCAAGAAAAAAAAAA | |
| TFF3 | GCCAAAACAGTGGGGGCTGAACTGACCTCTCCCCTTTGGGAGAGAAAAACTGTCTGGGAGCTTGACAAAG | 142 |
| NM_003226.3 | GCATGCAGGAGAGAACAGGAGCAGCCACAGCCAGGAGGGAGAGCCTTCCCCAAGCAAACAATCCAGAGCA | |
| | GCTGTGCAAACAACGGTGCATAAATGAGGCCTCCTGGACCATGAAGCGAGTCCTGAGCTGCGTCCCGGAG | |
| | CCCACGGTGGTCATGGCTGCCAGAGCGCTCTGCATGCTGGGGCTGGTCCTGGCCTTGCTGTCCTCCAGCT | |
| | CTGCTGAGGAGTACGTGGGCCTGTCTGCAAACCAGTGTGCCGTGCCAGCCAAGGACAGGGTGGACTGCGG | |
| | CTACCCCCATGTCACCCCCAAGGAGTGCAACAACCGGGGCTGCTGCTTTGACTCCAGGATCCCTGGAGTG | |
| | CCTTGGTGTTTCAAGCCCCTGCAGGAAGCAGAATGCACCTTCTGAGGCACCTCCAGCTGCCCCCGGCCGG | |
| | GGGATGCGAGGCTCGGAGCACCCTTGCCCGGCTGTGATTGCTGCCAGGCACTGTTCATCTCAGCTTTTCT | |
| | GTCCCTTTGCTCCCGGCAAGCGCTTCTGCTGAAAGTTCATATCTGGAGCCTGATGTCTTAACGAATAAAG | |
| | GTCCCATGCTCCACCCGAGGACAGTTCTTCGTGCCTGAGACTTTCTGAGGTTGTGCTTTATTTCTGCTGC | |
| | GTCGTGGGAGAGGGCGGGAGGGTGTCAGGGGAGAGTCTGCCCAGGCCTCAAGGGCAGGAAAAGACTCCCT | |
| | AAGGAGCTGCAGTGCATGCAAGGATATTTTGAATCCAGACTGGCACCCACGTCACAGGAAAGCCTAGGAA | |
| | CACTGTAAGTGCCGCTTCCTCGGGAAAGCAGAAAAAATACATTTCAGGTAGAAGTTTTCAAAAATCACAA | |
| | GTCTTTCTTGGTGAAGACAGCAAGCCAATAAAACTGTCTTCCAAAGTGGTCCTTTATTTCACAACCACTC | |
| | TCGCTACTGTTCAATACTTGTACTATTCCTGGGTTTTGTTTCTTTGTACAGTAAACATTATGAACAAACA | |
| | GGCA | |
| PIB5PA | AGGCTGCCGGGGGCTGCAGACATGGAGGGCCAGAGCAGCAGGGGCAGCAGGAGGCCAGGGACCCGGGCTG | 143 |
| AK126610.1 | GCCTGGGTTCCCTGCCCATGCCCCAGGGTGTTGCCCAAACTGGGGCACCCTCCAAGGTGGACTCAAGTTT | |
| | TCAGCTCCCAGCAAAGAAGAACGCAGCCCTAGGACCCTCGGAACCAAGGATCACTGTGGTCACATGGAAC | |
| | GTGGGCACTGCCATGCCCCCAGACGATGTCACATCCCTCCTCCACCTGGGCGGTGGTGACGACAGCGACG | |
| | GCGCAGACATGATCGCCATAGGGTTGCAGGAAGTGAACTCCATGCTCAACAAGCGACTCAAGGACGCCCT | |
| | CTTCACGGACCAGTGGAGTGAGCTGTTCATGGATGCGCTAGGGCCCTTCAACTTCGTGCTGGTGAGTTCA | |
| | GTGAGGATGCAGGGTGTCATCCTGCTGCTGTTCGCCAAGTACTACCACCTGCCCTTCCTGCGAGACGTGC | |
| | AGACCGACTGCACGCGCACTGGCCTGGGCGGCTACTGGGGTAACAAGGGTGGCGTGAGCGTGCGCCTGGC | |
| | GGCCTTCGGGCACATGCTCTGCTTCCTGAACTGCCACTTGCCTGCGCATATGGACAAGGCGGAGCAGCGC | |
| | AAAGACAACTTCCAGACCATCCTCAGCCTCCAGCAGTTCCAAGGGCCGGGCGCACAGGGCATCCTGGATC | |
| | ATGACCTCGTGTTCTGGTTCGGGGACCTGAACTTCCGCATTGAGAGCTATGACCTGCACTTTGTCAAGTT | |
| | TGCCATCGACAGTGACCAGCTCCATCAGCTCTGGGAGAAGGACCAGCTCAACATGGCCAAGAACACCTGG | |
| | CCCATTCTGAAGGGCTTTCAGGAGGGGCCCCTCAACTTCGCTCCCACCTTCAAGTTTGATGCGGGTACCA | |
| | ACAAATACGATACCAGTGCCAAGAAACGGAAGCCAGCTTGGACAGACCGTATCCTATGGAAGGTCAAGGC | |
| | TCCAGGTGGGGGTCCCAGCCCCTCAGGACGGAAGAGCCACCGACTCCAGGTGACGCAGCACAGCTACCGC | |
| | AGCCACATGGAATACACAGTCAGCGACCACAAGCCTGTGGCTGCCCAGTTCCTCCTGCAGTTTGCCTTCA | |
| | GGGACGACATGCCACTGGTGCGGCTGGAGGTGGCAGATGAGTGGGTGCGGCCCGAGCAGGCGGTGGTGAG | |
| | GTACCGCATGGAAACAGTGTTCGCCCGCAGCTCCTGGGACTGGATCGGCTTATACCGGGTGGGTTTCCGC | |
| | CATTGCAAGGACTATGTGGCTTATGTCTGGGCCAAACATGAAGATGTGGATGGGAATACCTACCAGGTAA | |
| | CATTCAGTGAGGAATCACTGCCCAAGGGCCATGGAGACTTCATCCTGGGCTACTATAGTCACAACCACAG | |
| | CATCCTCATCGGCATCACTGAACCCTTCCAGATCTCGCTGCCTTCCTCGGAGTTGGCCAGCAGCAGCACA | |
| | GACAGCTCAGGCACCAGCTCAGAGGGAGAGGATGACAGCACACTGGAGCTCCTTGCACCCAAGTCCCGCA | |
| | GCCCCAGTCCTGGCAAGTCCAAGCGACACCGCAGCCGCAGCCCGGGACTGGCCAGGTTCCCTGGGCTTGC | |
| | CCTACGGCCCTCATCCCGTGAACGCCGTGGTGCCAGCCGTAGCCCCTCACCCCAGAGCCGCCGCCTGTCC | |
| | CGAGTGGCTCCTGACAGGAGCAGTAATGGCAGCAGCCGGGGCAGTAGTGAAGAGGGGCCCTCTGGGTTGC | |
| | CTGGCCCCTGGGCCTTCCCACCAGCTGTGCCTCGAAGCCTGGGCCTGTTGCCCGCCTTGCGCCTAGAGAC | |
| | TGTAGACCCTGGTGGTGGTGGCTCCTGGGGACCTGATCGGGAGGCCCTGGCGCCCAACAGCCTGTCTCCT | |
| | AGTCCCCAGGGCCATCGGGGGCTGGAGGAAGGGGGCCTGGGGCCCTGAGGGTGGGGTAGGCAGATGGGCC | |
| | AAGGTGACCACCATTCTGCCTCAATCTTTTGCAAGCCCACCTGCCTCTCTCCTGCTGCTCCTCCAGCTGT | |
| | ATCTGCACCTGCCTCTCTGTCCTGGCCAGGGGTGGACAACTGGGGTCCCCCAAAACTCAGTCCTGGCACC | |
| | TCAACTGTGACAATCAGCAAAGCCCCACCCAGGCCCCCATCTGGGATGATGGGAGAGCTCTGGCAGATGT | |
| | CCCAATCCTGGAGGTCATCCATTAGGAATTAAATTCTCCAGCCTC | |
| BCL11A | TTTTTTTTTTTTTTTTGCTTAAAAAAAAGCCATGACGGCTCTCCCACAATTCATCTTCCCTGCGCCATCT | 144 |
| NM_022893.3 | TTGTATTATTTCTAATTTATTTTGGATGTCAAAAGGCACTGATGAAGATATTTTCTCTGGAGTCTCCTTC | |
| | TTTCTAACCCGGCTCTCCCGATGTGAACCGAGCCGTCGTCCGCCCGCCGCCGCCGCCGCCGCCGCCGCCG | |
| | CCCGCCCCGCAGCCCACCATGTCTCGCCGCAAGCAAGGCAAACCCCAGCACTTAAGCAAACGGGAATTCT | |
| | CGCCCGAGCCTCTTGAAGCCATTCTTACAGATGATGAACCAGACCACGGCCCGTTGGGAGCTCCAGAAGG | |
| | GGATCATGACCTCCTCACCTGTGGGCAGTGCCAGATGAACTTCCCATTGGGGGACATTCTTATTTTTATC | |
| | GAGCACAAACGGAAACAATGCAATGGCAGCCTCTGCTTAGAAAAAGCTGTGGATAAGCCACCTTCCCCTT | |
| | CACCAATCGAGATGAAAAAAGCATCCAATCCCGTGGAGGTTGGCATCCAGGTCACGCCAGAGGATGACGA | |
| | TTGTTTATCAACGTCATCTAGAGGAATTTGCCCCAAACAGGAACACATAGCAGATAAACTTCTGCACTGG | |
| | AGGGGCCTCTCCTCCCCTCGTTCTGCACATGGAGCTCTAATCCCCACGCCTGGGATGAGTGCAGAATATG | |
| | CCCCGCAGGGTATTTGTAAAGATGAGCCCAGCAGCTACACATGTACAACTTGCAAACAGCCATTCACCAG | |
| | TGCATGGTTTCTCTTGCAACACGCACAGAACACTCATGGATTAAGAATCTACTTAGAAAGCGAACACGGA | |
| | AGTCCCCTGACCCCGCGGGTTGGTATCCCTTCAGGACTAGGTGCAGAATGTCCTTCCCAGCCACCTCTCC | |
| | ATGGGATTCATATTGCAGACAATAACCCCTTTAACCTGCTAAGAATACCAGGATCAGTATCGAGAGAGGC | |
| | TTCCGGCCTGGCAGAAGGGCGCTTTCCACCCACTCCCCCCCTGTTTAGTCCACCACCGAGACATCACTTG | |
| | GACCCCCACCGCATAGAGCGCCTGGGGGCGGAAGAGATGGCCCTGGCCACCCATCACCCGAGTGCCTTTG | |
| | ACAGGGTGCTGCGGTTGAATCCAATGGCTATGGAGCCTCCCGCCATGGATTTCTCTAGGAGACTTAGAGA | |
| | GCTGGCAGGGAACACGTCTAGCCCACCGCTGTCCCCAGGCCGGCCCAGCCCTATGCAAAGGTTACTGCAA | |
| | CCATTCCAGCCAGGTAGCAAGCCGCCCTTCCTGGCGACGCCCCCCCTCCCTCCTCTGCAATCCGCCCCTC | |
| | CTCCCTCCCAGCCCCCGGTCAAGTCCAAGTCATGCGAGTTCTGCGGCAAGACGTTCAAATTTCAGAGCAA | |
| | CCTGGTGGTGCACCGGCGCAGCCACACGGGCGAGAAGCCCTACAAGTGCAACCTGTGCGACCACGCGTGC | |
| | ACCCAGGCCAGCAAGCTGAAGCGCCACATGAAGACGCACATGCACAAATCGTCCCCCATGACGGTCAAGT | |
| | CCGACGACGGTCTCTCCACCGCCAGCTCCCCGGAACCCGGCACCAGCGACTTGGTGGGCAGCGCCAGCAG | |
| | CGCGCTCAAGTCCGTGGTGGCCAAGTTCAAGAGCGAGAACGACCCCAACCTGATCCCGGAGAACGGGGAC | |
| | GAGGAGGAAGAGGAGGACGACGAGGAAGAGGAAGAAGAGGAGGAAGAGGAGGAGGAGGAGCTGACGGAGA | |
| | GCGAGAGGGTGGACTACGGCTTCGGGCTGAGCCTGGAGGCGGCGCGCCACCACGAGAACAGCTCGCGGGG | |
| | CGCGGTCGTGGGCGTGGGCGACGAGAGCCGCGCCCTGCCCGACGTCATGCAGGGCATGGTGCTCAGCTCC | |
| | ATGCAGCACTTCAGCGAGGCCTTCCACCAGGTCCTGGGCGAGAAGCATAAGCGCGGCCACCTGGCCGAGG | |
| | CCGAGGGCCACAGGGACACTTGCGACGAAGACTCGGTGGCCGGCGAGTCGGACCGCATAGACGATGGCAC | |
| | TGTTAATGGCCGCGGCTGCTCCCCGGGCGAGTCGGCCTCGGGGGGCCTGTCCAAAAAGCTGCTGCTGGGC | |
| | AGCCCCAGCTCGCTGAGCCCCTTCTCTAAGCGCATCAAGCTCGAGAAGGAGTTCGACCTGCCCCCGGCCG | |
| | CGATGCCCAACACGGAGAACGTGTACTCGCAGTGGCTCGCCGGCTACGCGGCCTCCAGGCAGCTCAAAGA | |
| | TCCCTTCCTTAGCTTCGGAGACTCCAGACAATCGCCTTTTGCCTCCTCGTCGGAGCACTCCTCGGAGAAC | |
| | GGGAGTTTGCGCTTCTCCACACCGCCCGGGGAGCTGGACGGAGGGATCTCGGGGCGCAGCGGCACGGGAA | |
| | GTGGAGGGAGCACGCCCCATATTAGTGGTCCGGGCCCGGGCAGGCCCAGCTCAAAAGAGGGCAGACGCAG | |
| | CGACACTTGTGAGTACTGTGGGAAAGTCTTCAAGAACTGTAGCAATCTCACTGTCCACAGGAGAAGCCAC | |
| | ACGGGCGAAAGGCCTTATAAATGCGAGCTGTGCAACTATGCCTGTGCCCAGAGTAGCAAGCTCACCAGGC | |
| | ACATGAAAACGCATGGCCAGGTGGGGAAGGACGTTTACAAATGTGAAATTTGTAAGATGCCTTTTAGCGT | |
| | GTACAGTACCCTGGAGAAACACATGAAAAAATGGCACAGTGATCGAGTGTTGAATAATGATATAAAAACT | |
| | GAATAGAGGTATATTAATACCCCTCCCTCACTCCCACCTGACACCCCCTTTTTCACCACTCCCCTTCCCC | |
| | ATCGCCCTCCAGCCCCACTCCCTGTAGGATTTTTTTCTAGTCCCATGTGATTTAAACAAACAAACAAACA | |
| | AACAGAAGTAACGAAGCTAAGAATATGAGAGTGCTTGTCACCAGCACACCTGTTTTTTTTCTTTTTCTTT | |
| | TTCTTTTTTCTTTTTCCTTTTTTTTTTTTTTCCTTTATGTTCTCACCGTTTGAATGCATGATCTGTATGG | |
| | GGCAATACTATTGCATTTTACGCAAACTTTGAGCCTTTCTCTTGTGCAATAATTTACATGTTGTGTATGT | |
| | TTTTTTTTAAACTTAGACAGCATGTATGGTATGTTATGGCTATTTTAAATTGTCCCTAATTCGTTGCTGA | |
| | GCAAACATGTTGCTGTTTCCAGTTCCGTTCTGAGAGAAAAAGAGAGAGAGAGAGAAAAAGACCATGCTGC | |
| | ATACATTCTGTAATACATATCATGTACAGTTTTATTTTATAACGTGAGGAGGAAAAACAGTCTTTGGATT | |
| | AACCCTCTATAGACAGAATAGATAGCACTGAAAAAAAATCTCTATGAGCTAAATGTCTGTCTCTAAAGGG | |
| | TTAAATGTATCAATTGGAAAGGAAGAAAAAAGGCCTTGAATTGACAAATTAACAGAAAAACAGAACAAGT | |
| | TTATTCTATCATTTGGTTTTAAAATATGAGTGCCTTGGATCTATTAAAACCACATCGATGGTTCTTTCTA | |
| | CTTGTTATAAACTTGTAGCTTAATTCAGCATTGGGTGAGGTAATAAACCTTAGGAACTAGCATATAATTC | |
| | TATATTGTATTTCTCACAACAATGGCTACCTAAAAAGATGACCCATTATGTCCTAGTTAATCATCATTTT | |
| | TCCTTTAGTTTAATTTTATAAACAAAACTGATTATACCAGTATAAAAGCTACTTTGCTCCTGGTGAGAGC | |
| | TTAAAAGAAATGGGCTGTTTTGCCCAAAGTTTTATTTTTTTTAAACAATGATTAAATTGAATGTGTAATG | |
| | TGCAAAAGCCCTGGAACGCAATTAAATACACTAGTAAGGAGTTCATTTTATGAAGATATTTGCTTTAATA | |
| | ATGTCTTTTTAAAAATACTGGCACCAAAAGAAATAGATCCAGATCTACTTGGTTGTCAAGTGGACAATCA | |
| | AATGATAAACTTTAAGACCTTGTATACCATATTGAAAGGAAGAGGCTGACAATAAGGTTTGACAGAGGGG | |
| | AACAGAAGAAAATAATATGATTTATTAGCACAACGTGGTACTATTTGCCATTTAAAACTAGAACAGGTAT | |
| | ATAAGCTAATATTGATACAATGATGATTAACTATGAATTCTTAAGACTTGCATTTAAATGTGACATTCTT | |
| | AAAAAAAGAAGAGAAAGAATTTTAAGAGTAGCAGTATATATGTCTGTGCTCCCTAAAAGTTGTACTTCAT | |
| | TTCTTTTCCATACACTGTGTGCTATTTGTGTTAACATGGAAGAGGATTCATTGTTTTTATTTTTATTTTT | |
| | TTAATTTTTTCTTTTTTATTAAGCTAGCATCTGCCCCAGTTGGTGTTCAAATAGCACTTGACTCTGCCTG | |
| | TGATATCTGTATCTTTTCTCTAATCAGAGATACAGAGGTTGAGTATAAAATAAACCTGCTCAGATAGGAC | |
| | AATTAAGTGCACTGTACAATTTTCCCAGTTTACAGGTCTATACTTAAGGGAAAAGTTGCAAGAATGCTGA | |
| | AAAAAAATTGAACACAATCTCATTGAGGAGCATTTTTTAAAAACTAAAAAAAAAAAAACTTTGCCAGCCA | |
| | TTTACTTGACTATTGAGCTTACTTACTTGGACGCAACATTGCAAGCGCTGTGAATGGAAACAGAATACAC | |
| | TTAACATAGAAATGAATGATTGCTTTCGCTTCTACAGTGCAAGGATTTTTTTGTACAAAACTTTTTTAAA | |
| | TATAAATGTTAAGAAAAATTTTTTTTAAAAAACACTTCATTATGTTTAGGGGGGAACTGCATTTTAGGGT | |
| | TCCATTGTCTTGGTGGTGTTACAAGACTTGTTATCCATTTAAAAATGGTAGTGGAAATTCTATGCCTTGG | |
| | ATACACACCGCTCTTCAGGTTGTAAAAAAAAAAAACATACATTGGGGAAAGGTTTAAGATTATATAGTAC | |
| | TTAAATATAGGAAAATGCACACTCATGTTGATTCCTATGCTAAAATACATTTATGGTCTTTTTTCTGTAT | |
| | TTCTAGAATGGTATTTGAATTAAATGTTCATCTAGTGTTAGGCACTATAGTATTTATATTGAAGCTTGTA | |
| | TTTTTAACTGTTGCTTGTTCTCTTAAAAGGTATCAATGTACCTTTTTTGGTAGTGGAAAAAAAAAAGACA | |
| | GGCTGCCACAGTATATTTTTTTAATTTGGCAGGATAATATAGTGCAAATTATTTGTATGCTTCAAAAAAA | |
| | AAAAAAAGAGAGAAACAAAAAAGTGTGACATTACAGATGAGAAGCCATATAATGGCGGTTTGGGGGAGCC | |
| | TGCTAGAATGTCACATGGATGGCTGTCATAGGGGTTGTACATATCCTTTTTTGTTCCTTTTTCCTGCTGC | |
| | CATACTGTATGCAGTACTGCAAGCTAATAACGTTGGTTTGTTATGTAGTGTGCTTTTTGTCCCTTTCCTT | |
| | CTATCACCCTACATTCCAGCATCTTACCTTCATATGCAGTAAAAGAAAGAAAGAAAAAAAAAGGAAAAAA | |
| | AAAAAAAAACCAATGTTTTGCAGTTTTTTTCATTGCCAAAAACTAAATGGTGCTTTATATTTAGATTGGA | |
| | AAGAATTTCATATGCAAAGCATATTAAAGAGAAAGCCCGCTTTAGTCAATACTTTTTTGTAAATGGCAAT | |
| | GCAGAATATTTTGTTATTGGCCTTTTCTATTCCTGTAATGAAAGCTGTTTGTCGTAACTTGAAATTTTAT | |
| | CTTTTACTATGGGAGTCACTATTTATTATTGCTTATGTGCCCTGTTCAAAACAGAGGCACTTAATTTGAT | |
| | CTTTTATTTTTCTTTGTTTTTATTTTTTTTTTTATTTAGATGACCAAAGGTCATTACAACCTGGCTTTTT | |
| | ATTGTATTTGTTTCTGGTCTTTGTTAAGTTCTATTGGAAAAACCACTGTCTGTGTTTTTTTGGCAGTTGT | |
| | CTGCATTAACCTGTTCATACACCCATTTTGTCCCTTTATTGAAAAAATAAAAAAAATTAAAGTACA | |
| E2F1 | TTGGCGCGTAAAAGTGGCCGGGACTTTGCAGGCAGCGGCGGCCGGGGGCGGAGCGGGATCGAGCCCTCGC | 145 |
| NM_005225.2 | CGAGGCCTGCCGCCATGGGCCCGCGCCGCCGCCGCCGCCTGTCACCCGGGCCGCGCGGGCCGTGAGCGTC | |
| | ATGGCCTTGGCCGGGGCCCCTGCGGGCGGCCCATGCGCGCCGGCGCTGGAGGCCCTGCTCGGGGCCGGCG | |
| | CGCTGCGGCTGCTCGACTCCTCGCAGATCGTCATCATCTCCGCCGCGCAGGACGCCAGCGCCCCGCCGGC | |
| | TCCCACCGGCCCCGCGGCGCCCGCCGCCGGCCCCTGCGACCCTGACCTGCTGCTCTTCGCCACACCGCAG | |
| | GCGCCCCGGCCCACACCCAGTGCGCCGCGGCCCGCGCTCGGCCGCCCGCCGGTGAAGCGGAGGCTGGACC | |
| | TGGAAACTGACCATCAGTACCTGGCCGAGAGCAGTGGGCCAGCTCGGGGCAGAGGCCGCCATCCAGGAAA | |
| | AGGTGTGAAATCCCCGGGGGAGAAGTCACGCTATGAGACCTCACTGAATCTGACCACCAAGCGCTTCCTG | |
| | GAGCTGCTGAGCCACTCGGCTGACGGTGTCGTCGACCTGAACTGGGCTGCCGAGGTGCTGAAGGTGCAGA | |
| | AGCGGCGCATCTATGACATCACCAACGTCCTTGAGGGCATCCAGCTCATTGCCAAGAAGTCCAAGAACCA | |
| | CATCCAGTGGCTGGGCAGCCACACCACAGTGGGCGTCGGCGGACGGCTTGAGGGGTTGACCCAGGACCTC | |
| | CGACAGCTGCAGGAGAGCGAGCAGCAGCTGGACCACCTGATGAATATCTGTACTACGCAGCTGCGCCTGC | |
| | TCTCCGAGGACACTGACAGCCAGCGCCTGGCCTACGTGACGTGTCAGGACCTTCGTAGCATTGCAGACCC | |
| | TGCAGAGCAGATGGTTATGGTGATCAAAGCCCCTCCTGAGACCCAGCTCCAAGCCGTGGACTCTTCGGAG | |
| | AACTTTCAGATCTCCCTTAAGAGCAAACAAGGCCCGATCGATGTTTTCCTGTGCCCTGAGGAGACCGTAG | |
| | GTGGGATCAGCCCTGGGAAGACCCCATCCCAGGAGGTCACTTCTGAGGAGGAGAACAGGGCCACTGACTC | |
| | TGCCACCATAGTGTCACCACCACCATCATCTCCCCCCTCATCCCTCACCACAGATCCCAGCCAGTCTCTA | |
| | CTCAGCCTGGAGCAAGAACCGCTGTTGTCCCGGATGGGCAGCCTGCGGGCTCCCGTGGACGAGGACCGCC | |
| | TGTCCCCGCTGGTGGCGGCCGACTCGCTCCTGGAGCATGTGCGGGAGGACTTCTCCGGCCTCCTCCCTGA | |
| | GGAGTTCATCAGCCTTTCCCCACCCCACGAGGCCCTCGACTACCACTTCGGCCTCGAGGAGGGCGAGGGC | |
| | ATCAGAGACCTCTTCGACTGTGACTTTGGGGACCTCACCCCCCTGGATTTCTGACAGGGCTTGGAGGGAC | |
| | CAGGGTTTCCAGAGATGCTCACCTTGTCTCTGCAGCCCTGGAGCCCCCTGTCCCTGGCCGTCCTCCCAGC | |
| | CTGTTTGGAAACATTTAATTTATACCCCTCTCCTCTGTCTCCAGAAGCTTCTAGCTCTGGGGTCTGGCTA | |
| | CCGCTAGGAGGCTGAGCAAGCCAGGAAGGGAAGGAGTCTGTGTGGTGTGTATGTGCATGCAGCCTACACC | |
| | CACACGTGTGTACCGGGGGTGAATGTGTGTGAGCATGTGTGTGTGCATGTACCGGGGAATGAAGGTGAAC | |
| | ATACACCTCTGTGTGTGCACTGCAGACACGCCCCAGTGTGTCCACATGTGTGTGCATGAGTCCATGTGTG | |
| | CGCGTGGGGGGGCTCTAACTGCACTTTCGGCCCTTTTGCTCTGGGGGTCCCACAAGGCCCAGGGCAGTGC | |
| | CTGCTCCCAGAATCTGGTGCTCTGACCAGGCCAGGTGGGGAGGCTTTGGCTGGCTGGGCGTGTAGGACGG | |
| | TGAGAGCACTTCTGTCTTAAAGGTTTTTTCTGATTGAAGCTTTAATGGAGCGTTATTTATTTATCGAGGC | |
| | CTCTTTGGTGAGCCTGGGGAATCAGCAAAGGGGAGGAGGGGTGTGGGGTTGATACCCCAACTCCCTCTAC | |
| | CCTTGAGCAAGGGCAGGGGTCCCTGAGCTGTTCTTCTGCCCCATACTGAAGGAACTGAGGCCTGGGTGAT | |
| | TTATTTATTGGGAAAGTGAGGGAGGGAGACAGACTGACTGACAGCCATGGGTGGTCAGATGGTGGGGTGG | |
| | GCCCTCTCCAGGGGGCCAGTTCAGGGCCCCAGCTGCCCCCCAGGATGGATATGAGATGGGAGAGGTGAGT | |
| | GGGGGACCTTCACTGATGTGGGCAGGAGGGGTGGTGAAGGCCTCCCCCAGCCCAGACCCTGTGGTCCCTC | |
| | CTGCAGTGTCTGAAGCGCCTGCCTCCCCACTGCTCTGCCCCACCCTCCAATCTGCACTTTGATTTGCTTC | |
| | CTAACAGCTCTGTTCCCTCCTGCTTTGGTTTTAATAAATATTTTGATGACGTTTGGGCCGGGTTTTGGGA | |
| | CTCTGTTGGGAACATTTCGGGGCGGGAGAGGCCAAGGTTGCTGGGGAAATGCCCATTCTCCACTTCCCTT | |
| | CTCCCTGTCCGTGCCCGATTTGATTTGAGCCTCATAACTCGAAGAAAGGTCAGCTTCCTCGCTGTTTTGG | |
| | TCCTAACTCAAAAGCAGATCCAGTAAAGGTTTTTGTTGTAAAAAAAAAAAAAAAAAAAAAAA | |
| RACGAP1 | AATAAATTTCTCTGTGATTGGTTGGTGAAGGTTTTCAAACCGGAGCTGTGGGCGCGGCGCTGCTCTGCCG | 146 |
| NM_013277.3 | TTGGGTGAGGCGCGGAGCGAAGTGAAGGGTGGCCCAGGTGGGGCCAGGCTGACTGAATGTATCTCCTAGC | |
| | TATGGACTAAATAATACATGGGGGGAAATAAACAAGTATTCATGAGGGTGAAAATGTGACCCAGCAGGAA | |
| | AATTACAACTATTTTCAATTGACGTTGAATAGGATGAGTCATGGAATTTAAGTGATTTACTGAAGATTAT | |
| | ACTACTGGTAGATAGAAGAGCTAAAGAAAGATGGATACTATGATGCTGAATGTGCGGAATCTGTTTGAGC | |
| | AGCTTGTGCGCCGGGTGGAGATTCTCAGTGAAGGAAATGAAGTCCAATTTATCCAGTTGGCGAAGGACTT | |
| | TGAGGATTTCCGTAAAAAGTGGCAGAGGACTGACCATGAGCTGGGGAAATACAAGGATCTTTTGATGAAA | |
| | GCAGAGACTGAGCGAAGTGCTCTGGATGTTAAGCTGAAGCATGCACGTAATCAGGTGGATGTAGAGATCA | |
| | AACGGAGACAGAGAGCTGAGGCTGACTGCGAAAAGCTGGAACGACAGATTCAGCTGATTCGAGAGATGCT | |
| | CATGTGTGACACATCTGGCAGCATTCAACTAAGCGAGGAGCAAAAATCAGCTCTGGCTTTTCTCAACAGA | |
| | GGCCAACCATCCAGCAGCAATGCTGGGAACAAAAGACTATCAACCATTGATGAATCTGGTTCCATTTTAT | |
| | CAGATATCAGCTTTGACAAGACTGATGAATCACTGGATTGGGACTCTTCTTTGGTGAAGACTTTCAAACT | |
| | GAAGAAGAGAGAAAAGAGGCGCTCTACTAGCCGACAGTTTGTTGATGGTCCCCCTGGACCTGTAAAGAAA | |
| | ACTCGTTCCATTGGCTCTGCAGTAGACCAGGGGAATGAATCCATAGTTGCAAAAACTACAGTGACTGTTC | |
| | CCAATGATGGCGGGCCCATCGAAGCTGTGTCCACTATTGAGACTGTGCCATATTGGACCAGGAGCCGAAG | |
| | GAAAACAGGTACTTTACAACCTTGGAACAGTGACTCCACCCTGAACAGCAGGCAGCTGGAGCCAAGAACT | |
| | GAGACAGACAGTGTGGGCACGCCACAGAGTAATGGAGGGATGCGCCTGCATGACTTTGTTTCTAAGACGG | |
| | TTATTAAACCTGAATCCTGTGTTCCATGTGGAAAGCGGATAAAATTTGGCAAATTATCTCTGAAGTGTCG | |
| | AGACTGTCGTGTGGTCTCTCATCCAGAATGTCGGGACCGCTGTCCCCTTCCCTGCATTCCTACCCTGATA | |
| | GGAACACCTGTCAAGATTGGAGAGGGAATGCTGGCAGACTTTGTGTCCCAGACTTCTCCAATGATCCCCT | |
| | CCATTGTTGTGCATTGTGTAAATGAGATTGAGCAAAGAGGTCTGACTGAGACAGGCCTGTATAGGATCTC | |
| | TGGCTGTGACCGCACAGTAAAAGAGCTGAAAGAGAAATTCCTCAGAGTGAAAACTGTACCCCTCCTCAGC | |
| | AAAGTGGATGATATCCATGCTATCTGTAGCCTTCTAAAAGACTTTCTTCGAAACCTCAAAGAACCTCTTC | |
| | TGACCTTTCGCCTTAACAGAGCCTTTATGGAAGCAGCAGAAATCACAGATGAAGACAACAGCATAGCTGC | |
| | CATGTACCAAGCTGTTGGTGAACTGCCCCAGGCCAACAGGGACACATTAGCTTTCCTCATGATTCACTTG | |
| | CAGAGAGTGGCTCAGAGTCCACATACTAAAATGGATGTTGCCAATCTGGCTAAAGTCTTTGGCCCTACAA | |
| | TAGTGGCCCATGCTGTGCCCAATCCAGACCCAGTGACAATGTTACAGGACATCAAGCGTCAACCCAAGGT | |
| | GGTTGAGCGCCTGCTTTCCTTGCCTCTGGAGTATTGGAGTCAGTTCATGATGGTGGAGCAAGAGAACATT | |
| | GACCCCCTACATGTCATTGAAAACTCAAATGCCTTTTCAACACCACAGACACCAGATATTAAAGTGAGTT | |
| | TACTGGGACCTGTGACCACTCCTGAACATCAGCTTCTCAAGACTCCTTCATCTAGTTCCCTGTCACAGAG | |
| | AGTCCGTTCCACCCTCACCAAGAACACTCCTAGATTTGGGAGCAAAAGCAAGTCTGCCACTAACCTAGGA | |
| | CGACAAGGCAACTTTTTTGCTTCTCCAATGCTCAAGTGAAGTCACATCTGCCTGTTACTTCCCAGCATTG | |
| | ACTGACTATAAGAAAGGACACATCTGTACTCTGCTCTGCAGCCTCCTGTACTCATTACTACTTTTAGCAT | |
| | TCTCCAGGCTTTTACTCAAGTTTAATTGTGCATGAGGGTTTTATTAAAACTATATATATCTCCCCTTCCT | |
| | TCTCCTCAAGTCACATAATATCAGCACTTTGTGCTGGTCATTGTTGGGAGCTTTTAGATGAGACATCTTT | |
| | CCAGGGGTAGAAGGGTTAGTATGGAATTGGTTGTGATTCTTTTTGGGGAAGGGGGTTATTGTTCCTTTGG | |
| | CTTAAAGCCAAATGCTGCTCATAGAATGATCTTTCTCTAGTTTCATTTAGAACTGATTTCCGTGAGACAA | |
| | TGACAGAAACCCTACCTATCTGATAAGATTAGCTTGTCTCAGGGTGGGAAGTGGGAGGGCAGGGCAAAGA | |
| | AAGGATTAGACCAGAGGATTTAGGATGCCTCCTTCTAAGAACCAGAAGTTCTCATTCCCCATTATGAACT | |
| | GAGCTATAATATGGAGCTTTCATAAAAATGGGATGCATTGAGGACAGAACTAGTGATGGGAGTATGCGTA | |
| | GCTTTGATTTGGATGATTAGGTCTTTAATAGTGTTGAGTGGCACAACCTTGTAAATGTGAAAGTACAACT | |
| | CGTATTTATCTCTGATGTGCTGCTGGCTGAACTTTGGGTTCATTTGGGGTCAAAGCCAGTTTTTCTTTTA | |
| | AAATTGAATTCATTCTGATGCTTGGCCCCCATACCCCCAACCTTGTCCAGTGGAGCCCAACTTCTAAAGG | |
| | TCAATATATCATCCTTTGGCATCCCAACTAACAATAAAGAGTAGGCTATAAGGGAAGATTGTCAATATTT | |
| | TGTGGTAAGAAAAGCTACAGTCATTTTTTCTTTGCACTTTGGATGCTGAAATTTTTCCCATGGAACATAG | |
| | CCACATCTAGATAGATGTGAGCTTTTTCTTCTGTTAAAATTATTCTTAATGTCTGTAAAAACGATTTTCT | |
| | TCTGTAGAATGTTTGACTTCGTATTGACCCTTATCTGTAAAACACCTATTTGGGATAATATTTGGAAAAA | |
| | AAGTAAATAGCTTTTTCAAAATGAA | |
| TRIP13 | CGGGTCAGGAGGTGGTGCGCCTCGCGCGGCAGATTCGAAGCTAGGGCGGGGCCCGCGGGCTGAGGCAGCG | 147 |
| NM_004237.3 | GCTGTGGCGGCGACGCTGGGCGTGAGGTGGCGGCGGCCGCGCCCTGGTTGGGTCCCCACTGCTCTCGGGG | |
| | GCGCCATGGACGAGGCCGTGGGCGACCTGAAGCAGGCGCTTCCCTGTGTGGCCGAGTCGCCAACGGTCCA | |
| | CGTGGAGGTGCATCAGCGCGGCAGCAGCACTGCAAAGAAAGAAGACATAAACCTGAGTGTTAGAAAGCTA | |
| | CTCAACAGACATAATATTGTGTTTGGTGATTACACATGGACTGAGTTTGATGAACCTTTTTTGACCAGAA | |
| | ATGTGCAGTCTGTGTCTATTATTGACACAGAATTAAAGGTTAAAGACTCACAGCCCATCGATTTGAGTGC | |
| | ATGCACTGTTGCACTTCACATTTTCCAGCTGAATGAAGATGGCCCCAGCAGTGAAAATCTGGAGGAAGAG | |
| | ACAGAAAACATAATTGCAGCAAATCACTGGGTTCTACCTGCAGCTGAATTCCATGGGCTTTGGGACAGCT | |
| | TGGTATACGATGTGGAAGTCAAATCCCATCTCCTCGATTATGTGATGACAACTTTACTGTTTTCAGACAA | |
| | GAACGTCAACAGCAACCTCATCACCTGGAACCGGGTGGTGCTGCTCCACGGTCCTCCTGGCACTGGAAAA | |
| | ACATCCCTGTGTAAAGCGTTAGCCCAGAAATTGACAATTAGACTTTCAAGCAGGTACCGATATGGCCAAT | |
| | TAATTGAAATAAACAGCCACAGCCTCTTTTCTAAGTGGTTTTCGGAAAGTGGCAAGCTGGTAACCAAGAT | |
| | GTTTCAGAAGATTCAGGATTTGATTGATGATAAAGACGCCCTGGTGTTCGTGCTGATTGATGAGGTGGAG | |
| | AGTCTCACAGCCGCCCGAAATGCCTGCAGGGCGGGCACCGAGCCATCAGATGCCATCCGCGTGGTCAATG | |
| | CTGTCTTGACCCAAATTGATCAGATTAAAAGGCATTCCAATGTTGTGATTCTGACCACTTCTAACATCAC | |
| | CGAGAAGATCGACGTGGCCTTCGTGGACAGGGCTGACATCAAGCAGTACATTGGGCCACCCTCTGCAGCA | |
| | GCCATCTTCAAAATCTACCTCTCTTGTTTGGAAGAACTGATGAAGTGTCAGATCATATACCCTCGCCAGC | |
| | AGCTGCTGACCCTCCGAGAGCTAGAGATGATTGGCTTCATTGAAAACAACGTGTCAAAATTGAGCCTTCT | |
| | TTTGAATGACATTTCAAGGAAGAGCGAGGGCCTCAGCGGCCGGGTCCTGAGAAAACTCCCCTTTCTGGCT | |
| | CATGCGCTGTATGTCCAGGCCCCCACCGTCACCATAGAGGGGTTCCTCCAGGCCCTGTCTCTGGCAGTGG | |
| | ACAAGCAGTTTGAAGAGAGAAAGAAGCTTGCAGCTTACATCTGATCCTGGGCTTCCCCATCTGGTGCTTT | |
| | TCCCATGGAGAACACACAACCAGTAAGTGAGGTTGCCCCACACAGCCGTCTCCCAGGGAATCCCTTCTGC | |
| | AAACCAAACGTTACTTAGACTGCAAGCTAGAAAGCCACCAAGGCCAGGCTTTGTTAAAAGAAGTGTATTC | |
| | TATTTATGTTGTTTTAAAATGCATACTGAGAGACAAACATCTTGTCATTTTCACTGTTTGTAAAAGATAA | |
| | TTCAGATTGTTTGTCTCCTTGTGAAGAACCATCGAAACCTGTTTGTTCCCAGCCCACCCCCAGTGGATGG | |
| | GATGCATAATGCCAGCAAGTTTTGTTTAACAGCAAAAAAGGAAGATTAATGCAGGTGTTATAGAAGCCAG | |
| | AAGAGAAACTGTGTCACCCTAAAGAAGCATATAATCATAGCATTAAAAATGCACACATTACTCCAGGTGG | |
| | AAGGTGGCAATTGCTTTCTGATATCAGCTCGTTTGATTTAGTGCAAAAATGTTTTCAAGACTATTTAATG | |
| | GATGTAAAAAAGCCTATTTCTACATTATACCAACTGAGAAAAAAATGGTCGGTAAAGTGTTCTTTCATAA | |
| | TAAATAATCAGACATGGTCCCATTTGCAGGAAAAGTGCAGACTCTGAGTGTTCCAGGGAAACACATGCTG | |
| | GACATCCCTTGTAACCCGGTATGGGCGCCCCTGCATTGCTGGGATGTTTCTGCCCACGGTTTTGTTTGTG | |
| | CAATAACGTTATCACATTTCTAATGAGGATTCACATTAATATAATATAAAATAAATAGGTCAGTTACTGG | |
| | TCTCTTTCTCCGAATGTTATGTTTTGCTTTTATCTCACAGTAAAATAAATATAATTAATGGTTTGCATGT | |
| | GAAATTCACTTTTGAAAGAACATGTTACCTTACCTTTTGTTTTAGAAGTTTTCAAGTATTAAAATATTTT | |
| | TTAGAATTTTAAAAAAAAAAAAAAAAAA | |
| UBE2T | AGTCAGAGGTCGCGCAGGCGCTGGTACCCCGTTGGTCCGCGCGTTGCTGCGTTGTGAGGGGTGTCAGCTC | 148 |
| NM_014176.3 | AGTGCATCCCAGGCAGCTCTTAGTGTGGAGCAGTGAACTGTGTGTGGTTCCTTCTACTTGGGGATCATGC | |
| | AGAGAGCTTCACGTCTGAAGAGAGAGCTGCACATGTTAGCCACAGAGCCACCCCCAGGCATCACATGTTG | |
| | GCAAGATAAAGACCAAATGGATGACCTGCGAGCTCAAATATTAGGTGGAGCCAACACACCTTATGAGAAA | |
| | GGTGTTTTTAAGCTAGAAGTTATCATTCCTGAGAGGTACCCATTTGAACCTCCTCAGATCCGATTTCTCA | |
| | CTCCAATTTATCATCCAAACATTGATTCTGCTGGAAGGATTTGTCTGGATGTTCTCAAATTGCCACCAAA | |
| | AGGTGCTTGGAGACCATCCCTCAACATCGCAACTGTGTTGACCTCTATTCAGCTGCTCATGTCAGAACCC | |
| | AACCCTGATGACCCGCTCATGGCTGACATATCCTCAGAATTTAAATATAATAAGCCAGCCTTCCTCAAGA | |
| | ATGCCAGACAGTGGACAGAGAAGCATGCAAGACAGAAACAAAAGGCTGATGAGGAAGAGATGCTTGATAA | |
| | TCTACCAGAGGCTGGTGACTCCAGAGTACACAACTCAACACAGAAAAGGAAGGCCAGTCAGCTAGTAGGC | |
| | ATAGAAAAGAAATTTCATCCTGATGTTTAGGGGACTTGTCCTGGTTCATCTTAGTTAATGTGTTCTTTGC | |
| | CAAGGTGATCTAAGTTGCCTACCTTGAATTTTTTTTTAAATATATTTGATGACATAATTTTTGTGTAGTT | |
| | TATTTATCTTGTACATATGTATTTTGAAATCTTTTAAACCTGAAAAATAAATAGTCATTTAATGTTGAAA | |
| | AAAAAAAAAAAAAAAAAAAAAAAAA | |
| CAPN13 | AGCAGACACCAGCACTGCTCTTTCTCCAAGACGGCCGGCCATGCTCTCCTCCTCTGCCAGTCTCCTCCAC | 149 |
| NM_144575.2 | CACTCTCTAACCTGAGAGCCTGTGGAACCTGCCCGTCTCCCCTCCTCCATCAGACACACCTGCCTAGGAA | |
| | ACAGGAAAGGACCTCGGAAGTCTTCTAAGGAGAGTCATGGCGTATTACCAGGAGCCTTCAGTGGAGACCT | |
| | CCATCATCAAGTTCAAAGACCAGGACTTTACCACCTTGCGGGATCACTGCCTGAGCATGGGCCGGACGTT | |
| | TAAGGATGAGACATTCCCTGCAGCAGATTCTTCCATAGGCCAGAAGCTGCTCCAGGAAAAACGCCTCTCC | |
| | AATGTGATATGGAAGCGGCCACAGGATCTACCAGGGGGTCCTCCTCACTTCATCCTGGATGATATAAGCA | |
| | GATTTGACATCCAACAAGGAGGCGCAGCTGACTGCTGGTTCCTGGCAGCACTGGGATCCTTGACTCAGAA | |
| | CCCACAGTACAGGCAGAAGATCCTGATGGTCCAAAGCTTTTCACACCAGTATGCTGGCATTTTCCGTTTC | |
| | CGGTTCTGGCAATGTGGCCAGTGGGTGGAAGTGGTGATTGATGACCGCCTACCTGTCCAGGGAGATAAAT | |
| | GCCTCTTTGTGCGTCCTCGCCACCAAAACCAAGAGTTCTGGCCCTGCCTGCTGGAGAAGGCCTATGCCAA | |
| | GCTGCTCGGATCCTATTCCGATCTGCACTATGGCTTCCTCGAGGATGCCCTGGTGGACCTCACAGGAGGC | |
| | GTGATCACCAACATCCATCTGCACTCTTCCCCTGTGGACCTGGTGAAGGCAGTGAAGACAGCGACCAAGG | |
| | CAGGCTCCCTGATAACCTGTGCCACTCCAAGTGGGCCAACAGATACAGCACAGGCGATGGAGAATGGGCT | |
| | GGTGAGTCTCCATGCCTACACTGTGACTGGGGCTGAGCAGATTCAATACCGAAGGGGCTGGGAAGAAATT | |
| | ATCTCCCTGTGGAACCCCTGGGGCTGGGGCGAGGCCGAATGGAGAGGGCGCTGGAGTGATGGGTCTCAGG | |
| | AGTGGGAGGAAACCTGTGATCCGCGGAAAAGCCAGCTACATAAGAAACGGGAAGATGGCGAGTTTTGGAT | |
| | GTCGTGTCAAGATTTCCAACAGAAATTCATCGCCATGTTTATATGTAGCGAAATTCCAATTACCCTGGAC | |
| | CATGGAAACACACTCCACGAAGGATGGTCCCAAATAATGTTTAGGAAGCAAGTGATTCTAGGAAACACTG | |
| | CAGGAGGACCTCGGAATGATGCTCAATTCAACTTCTCTGTGCAAGAGCCAATGGAAGGCACCAATGTTGT | |
| | CGTGTGCGTCACAGTTGCTGTCACACCATCAAATTTGAAAGCAGAAGATGCAAAATTTCCACTCGATTTC | |
| | CAAGTGATTCTGGCTGGCTCACAGCGGTTCCGGGAGAAATTTCCACCCGTGTTTTTTTCCTCGTTCAGAA | |
| | ACACTGTCCAAAGCTCAAATAATAAATTCCGCCGCAACTTCACCATGACTTACCATCTGAGCCCTGGGAA | |
| | CTATGTTGTGGTTGCACAGACACGGAGAAAATCAGCGGAGTTCTTGCTCCGAATCTTCCTGAAAATGCCA | |
| | GACAGTGACAGGCACCTGAGCAGCCATTTCAACCTCAGAATGAAGGGAAGCCCTTCAGAACATGGCTCCC | |
| | AACAAAGCATTTTCAACAGATATGCTCAGCAGAGGCTGGACATTGATGCCACCCAGCTTCAGGGCCTTCT | |
| | CAACCAGGAGCTTCTAACAGGACCTCCAGGGGACATGTTCTCCTTAGATGAGTGCCGCAGCTTGGTGGCT | |
| | CTGATGGAACTGAAAGTGAATGGGCGGCTAGACCAAGAGGAGTTTGCGCGACTGTGGAAGCGCCTTGTTC | |
| | ACTACCAGCATGTTTTCCAGAAGGTTCAGACAAGCCCTGGAGTCCTCCTGAGCTCGGACTTGTGGAAGGC | |
| | CATAGAGAATACAGACTTCCTCAGAGGGATCTTCATCAGCCGTGAGCTGCTGCATCTGGTGACCCTCAGG | |
| | TACAGCGACAGCGTCGGCAGGGTCAGCTTCCCCAGCCTGGTCTGCTTCCTGATGCGGCTTGAAGCCATGG | |
| | CAAAGACCTTCCGCAACCTCTCTAAGGATGGAAAAGGACTCTACCTGACAGAAATGGAGTGGATGAGCCT | |
| | GGTCATGTACAACTGAAGCAAAGAGGAAAGCAGACCCATGGCTCAGGACAAGCTCCCAGTGATCACTCAA | |
| | GAATCTGGCTCTCATTCTAAGAGGCTGTGCTGCCCAGTATGGTGGTTGTGATAAATCTAAACCAGCCCTG | |
| | CATGAAACAGAGTCCAAGCTGTCTCCCAACAGCCTGGGTTCGGTCCTTGGCTGGCCCAGGCCCAGTTAAG | |
| | CCTGTGGCCACCAAGCAGCTCATCTGAGCACTTTGGGATGTATTCAGCCTACGTTGCCCTGGAAAAGGAA | |
| | GCAGGAGATGTCTCCCTGTGGGAAAGGAGAAGAGAAGTTGTCTCTGAGTCCCCTGTCACCAGTTGGATTC | |
| | ATTTCTTGGAAGAGCCAGAATGAGCCACTTTGACCACCCTCGGGTGCTATGGGTGACACAAGAGCTGTCC | |
| | ACTGGGTGTTTGCAGAATAATTACACTATCTTATGTCTGGATCCTGATGATTTCACAGCTAAATGGCAAA | |
| | AATAAAACATGTTTCCCATAAAAAAAAAAA | |
| ACOT4 | TTGGGCGCCACACCTTGCGCGCCCCGGGGCCCAAGGAGACGACCCTGAAGAGGAGCCTGGCTACTTTTGC | 150 |
| NM_152331.3 | CTCAGACGAGTCCGGAGCGCCGGGTTAACCGGTCTGAAGTCCCAGGGGCTTTCTGGGACTGCTCAGCCAC | |
| | CGGCAGCTTCCGGCACCAGGGGACGCCGGACGCCGTCCGGACATTCGGCGCGCTTGCCACGATCTTGGAC | |
| | GGGTCTCGGGCCTCGACCTTTGAATTCCCCGCTCCGGCTCCAAGATGTCAGCAACGCTGATCCTGGAGCC | |
| | CCCAGGCCGCTGCTGCTGGAACGAGCCGGTGCGCATTGCCGTGCGCGGCCTGGCCCCGGAGCAGCGGGTT | |
| | ACGCTGCGCGCGTCCCTGCGCGACGAGAAGGGCGCGCTCTTCCGGGCCCACGCGCGCTACTGCGCCGACG | |
| | CCCGCGGCGAGCTGGACCTGGAGCGCGCACCCGCGCTGGGCGGCAGCTTCGCGGGACTCGAGCCCATGGG | |
| | GCTGCTCTGGGCCCTGGAACCCGAGAAGCCTTTTTGGCGCTTCCTGAAGCGGGACGTACAGATTCCTTTT | |
| | GTCGTGGAGTTGGAGGTGCTGGACGGCCACGACCCCGAGCCTGGACGGCTGCTGTGCCAGGCGCAGCACG | |
| | AGCGCCACTTCCTCCCGCCAGGGGTGCGGCGCCAGTCGGTGCGAGCGGGCCGGGTGCGCGCCACGCTCTT | |
| | CCTGCCGCCAGGACCTGGACCCTTCCCAGGGATCATTGACATCTTTGGTATTGGAGGGGGCCTCTTGGAA | |
| | TATCGAGCCAGCCTCCTTGCTGGCCATGGCTTTGCCACGTTGGCTCTAGCTTATTATAACTTTGAAGATC | |
| | TCCCCAATAACATGGACAACATATCCCTGGAGTACTTCGAAGAAGCCGTATGCTACATGCTTCAACATCC | |
| | CCAGGTAAAAGGCCCAGGCATTGGGCTTTTGGGCATTTCTCTAGGAGCTGATATTTGTCTCTCAATGGCC | |
| | TCATTCTTGAAGAATGTCTCAGCCACAGTTTCCATCAATGGATCTGGGATCAGTGGGAACACAGCCATCA | |
| | ACTATAAGCACAGTAGCATTCCACCATTGGGCTATGACCTGAGGAGAATCAAGGTAGCTTTCTCAGGCCT | |
| | CGTGGACATTGTGGATATAAGGAATGCTCTCGTAGGAGGGTACAAGAACCCCAGCATGATTCCAATAGAG | |
| | AAGGCCCAGGGGCCCATCCTGCTCATTGTTGGTCAGGATGACCATAACTGGAGAAGTGAGTTGTATGCCC | |
| | AAACAGTCTCTGAACGGTTACAGGCCCATGGAAAGGAAAAACCCCAGATCATCTGTTACCCTGGGACTGG | |
| | GCATTACATCGAGCCTCCTTACTTCCCCCTGTGCCCAGCTTCCCTTCACAGATTACTGAACAAACATGTT | |
| | ATATGGGGTGGGGAGCCCAGGGCTCATTCTAAGGCCCAGGAAGATGCCTGGAAGCAAATTCTAGCCTTCT | |
| | TCTGCAAACACCTGGGAGGTACCCAGAAAACAGCTGTCCCTAAATTGTAATGCATTTGTCTGTTGTTGAC | |
| | ATGAGAGATTCAAGATCAGATTCTAGTGTTCAGTAACCCTATGTGAATCAGATGTCTCCTGGATAACATT | |
| | AAAGCCATGTCTTTGTCATTAAAAAAAAAAAAAAAAAAAAAAAAAAAAAAAAAAAAAAAAAAAAAAAAAA | |
| | AAAAAAAAAAAAAAAAAAAAAAA | |
| PRC1 | GTTTGCGGGTGGTTGTTGCTCTCGGGGCCGTGTGGAGTAGGTCTGGACCTGGACTCACGGCTGCTTGGAG | 151 |
| AF044588.1 | CGTCCGCCATGAGGAGAAGTGAGGTGCTGGCGGAGGAGTCCATAGTATGTCTGCAGAAAGCCCTAAATCA | |
| | CCTTCGGGAAATATGGGAGCTAATTGGGATTCCAGAGGACCAGCGGTTACAAAGAACTGAGGTGGTAAAG | |
| | AAGCATATCAAGGAACTCCTGGATATGATGATTGCTGAAGAGGAAAGCCTGAAGGAAAGACTCATCAAAA | |
| | GCATATCCGTCTGTCAGAAAGAGCTGAACACTCTGTGCAGCGAGTTACATGTTGAGCCATTTCAGGAAGA | |
| | AGGAGAGACGACCATCTTGCAACTAGAAAAAGATTTGCGCACCCAAGTGGAATTGATGCGAAAACAGAAA | |
| | AAGGAGAGAAAACAGGAACTGAAGCTACTTCAAGAGCAAGATCAAGAACTGTGCGAAATTCTTTGTATGC | |
| | CCCACTATGATATTGACAGTGCCTCAGTGCCCAGCTTAGAAGAGCTGAACCAGTTCAGGCAACATGTGAC | |
| | AACTTTGAGGGAAACAAAGGCTTCTAGGCGTGAGGAGTTTGTCAGTATAAAGAGACAGATCATACTGTGT | |
| | ATGGAAGAATTAGACCACACCCCAGACACAAGCTTTGAAAGAGATGTGGTGTGTGAAGACGAAGATGCCT | |
| | TTTGTTTGTCTTTGGAGAATATTGCAACACTACAAAAGTTGCTACGGCAGCTGGAAATGCAGAAATCACA | |
| | AAATGAAGCAGTGTGTGAGGGGCTGCGTACTCAAATCCGAGAGCTCTGGGACAGGTTGCAAATACCTGAA | |
| | GAAGAAAGAGAAGCTGTGGCCACCATTATGTCTGGGTCAAAGGCCAAGGTCCGGAAAGCGCTGCAATTAG | |
| | AAGTGGATCGGTTGGAAGAACTGAAAATGCAAAACATGAAGAAAGTGATTGAGGCAATTCGAGTGGAGCT | |
| | GGTTCAGTACTGGGACCAGTGCTTTTATAGCCAGGAGCAGAGACAAGCTTTTGCCCCTTTCTGTGCTGAG | |
| | GACTACACAGAAAGTCTGCTCCAGCTCCACGATGCTGAGATTGTGCGGTTAAAAAACTACTATGAAGTTC | |
| | ACAAGGAACTCTTTGAAGGTGTCCAGAAGTGGGAAGAAACCTGGAGGCTTTTCTTAGAGTTTGAGAGAAA | |
| | AGCTTCAGATCCAAATCGATTTACAAACCGAGGAGGAAATCTTCTAAAAGAAGAAAAACAACGAGCCAAG | |
| | CTCCAGAAAATGCTGCCCAAGCTGGAAGAAGAGTTGAAGGCACGAATTGAATTGTGGGAACAGGAACATT | |
| | CAAAGGCATTTATGGTGAATGGGCAGAAATTCATGGAGTATGTGGCAGAACAATGGGAGATGCATCGATT | |
| | GGAGAAAGAGAGAGCCAAGCAGGAAAGACAACTGAAGAACAAAAAACAGACAGAGACAGAGATGCTGTAT | |
| | GGCAGCGCTCCTCGAACACCTAGCAAGCGGCGAGGACTGGCTCCCAATACACCGGGCAAAGCACGTAAGC | |
| | TGAACACTACCACCATGTCCAATGCTACGGCCAATAGTAGCATTCGGCCTATCTTTGGAGGGACAGTCTA | |
| | CCACTCCCCCGTGTCTCGACTTCCTCCTTCTGGCAGCAAGCCAGTCGCTGCTTCCACCTGTTCAGGGAAG | |
| | AAAACACCCCGTACTGGCAGGCATGGAGCCAACAAGGAGAACCTGGAGCTCAACGGCAGCATCCTGAGTG | |
| | GTGGGTACCCTGGCTCGGCCCCCCTCCAGCGCAACTTCAGCATTAATTCTGTTGCCAGCACCTATTCTGA | |
| | GTTTGCGAAGGATCCGTCCCTCTCTGACAGTTCCACTGTTGGGCTTCAGCGAGAACTTTCAAAGGCTTCC | |
| | AAATCTGATGCTACTTCTGGAATCCTCAATTCAACCAACATCCAGTCCTGAGAAGCCCTGATCAGTCAAC | |
| | CAGCTGTGGCTTCCTGTGCCTAGACTGGACCTAATTATATGGGGGTGACTTTAGTTTTTCTTCAGCTTAG | |
| | GAGTGCTTGAAACCTTGGCCAGGTTCCATGACCATGGGCCTAACTTAAAGATGTGAATGAGTGTTACAGT | |
| | TGAAAGCCCATCATAGGTTTAGTGGTCCTAGGAGACTTGGTTTTGACTTATATACATGAAAAGTTTATGG | |
| | CAAGAAGTGCAAATTTTAGCATATGGGGCCTGACTTCTCTACCACATAATTCTACTTGCTGAAGCATGAT | |
| | CAAAGCTTGTTTTATTTCACCACTGTAGGAAAATGATTGACTATGCCCATCCCTGGGGGTAATTTTGGCA | |
| | TGTATACCTGTAACTAGTAATTAACATCTTTTTTGTTTAGGCATGTTCAATTAATGCTGTAGCTATCATA | |
| | GCTTTGCTCTTACCTGAAGCCTTGTCCCCACCACACAGGACAGCCTTCCTCCTGAAGAGAATGTCTTTGT | |
| | GTGTCCGAAGTTGAGATGGCCTGCCCTACTGGCAAAGAGGTGACAGGAAGGCTGGGAGCAGCTTTGTTAA | |
| | ATTGTGTTCAGTTCTGTTACACAGTGCATTGCCCTTTGTTGGGGGTATGCATGTATGAACACACATGCTT | |
| | GTCGGAACGCTTTCTCGGCGTTTGTCCCTTGGCTCTCATCTCCCCCATTCCTGTGCCTACTTTGCCTGAG | |
| | TTCTTCTACCCCCGCAGTTGCCAGCCAGATTGGGAGTCTGTTTGTTCCAATGGGTTGAGCTGTCTTTGTC | |
| | GTGGAGATCTGGAACTTTGCACATGTCACTACTGGGGAGGTGTTCCTGCTCTAGCTTCCACGATGAGGCG | |
| | CCCTCTTTACCTATCCTCTCAATCACTACTCTTCTTGAAGCACTATTATTTATTCTTCCGCTGTCTGCCT | |
| | GCAGCAGTACTACTGTCAACATAGTGTAAATGGTTCTCAAAAGCTTACCAGTGTGGACTTGGTGTTAGCC | |
| | ACGCTGTTTACCTCATACAGTACGTGTCCTGTTTTTAAAATATACAATTATTCTTAAAAATAAATTAAAA | |
| | TCGTATACTTACATTTCAAAAAAAAAAAAAAAAA | |
| SPDEF | AACTCTTCATCTCGCGGCTGTCTGACTTCCTCCCAGCACATTCCTGCACTCTGCCGTGTCCACACTGCCC | 152 |
| NM_012391.2 | CACAGACCCAGTCCTCCAAGCCTGCTGCCAGCTCCCTGCAAGCCCCTCAGGTTGGGCCTTGCCACGGTGC | |
| | CAGCAGGCAGCCCTGGGCTGGGGGTAGGGGACTCCCTACAGGCACGCAGCCCTGAGACCTCAGAGGGCCA | |
| | CCCCTTGAGGGTGGCCAGGCCCCCAGTGGCCAACCTGAGTGCTGCCTCTGCCACCAGCCCTGCTGGCCCC | |
| | TGGTTCCGCTGGCCCCCCAGATGCCTGGCTGAGACACGCCAGTGGCCTCAGCTGCCCACACCTCTTCCCG | |
| | GCCCCTGAAGTTGGCACTGCAGCAGACAGCTCCCTGGGCACCAGGCAGCTAACAGACACAGCCGCCAGCC | |
| | CAAACAGCAGCGGCATGGGCAGCGCCAGCCCGGGTCTGAGCAGCGTATCCCCCAGCCACCTCCTGCTGCC | |
| | CCCCGACACGGTGTCGCGGACAGGCTTGGAGAAGGCGGCAGCGGGGGCAGTGGGTCTCGAGAGACGGGAC | |
| | TGGAGTCCCAGTCCACCCGCCACGCCCGAGCAGGGCCTGTCCGCCTTCTACCTCTCCTACTTTGACATGC | |
| | TGTACCCTGAGGACAGCAGCTGGGCAGCCAAGGCCCCTGGGGCCAGCAGTCGGGAGGAGCCACCTGAGGA | |
| | GCCTGAGCAGTGCCCGGTCATTGACAGCCAAGCCCCAGCGGGCAGCCTGGACTTGGTGCCCGGCGGGCTG | |
| | ACCTTGGAGGAGCACTCGCTGGAGCAGGTGCAGTCCATGGTGGTGGGCGAAGTGCTCAAGGACATCGAGA | |
| | CGGCCTGCAAGCTGCTCAACATCACCGCAGATCCCATGGACTGGAGCCCCAGCAATGTGCAGAAGTGGCT | |
| | CCTGTGGACAGAGCACCAATACCGGCTGCCCCCCATGGGCAAGGCCTTCCAGGAGCTGGCGGGCAAGGAG | |
| | CTGTGCGCCATGTCGGAGGAGCAGTTCCGCCAGCGCTCGCCCCTGGGTGGGGATGTGCTGCACGCCCACC | |
| | TGGACATCTGGAAGTCAGCGGCCTGGATGAAAGAGCGGACTTCACCTGGGGCGATTCACTACTGTGCCTC | |
| | GACCAGTGAGGAGAGCTGGACCGACAGCGAGGTGGACTCATCATGCTCCGGGCAGCCCATCCACCTGTGG | |
| | CAGTTCCTCAAGGAGTTGCTACTCAAGCCCCACAGCTATGGCCGCTTCATTAGGTGGCTCAACAAGGAGA | |
| | AGGGCATCTTCAAAATTGAGGACTCAGCCCAGGTGGCCCGGCTGTGGGGCATCCGCAAGAACCGTCCCGC | |
| | CATGAACTACGACAAGCTGAGCCGCTCCATCCGCCAGTATTACAAGAAGGGCATCATCCGGAAGCCAGAC | |
| | ATCTCCCAGCGCCTCGTCTACCAGTTCGTGCACCCCATCTGAGTGCCTGGCCCAGGGCCTGAAACCCGCC | |
| | CTCAGGGGCCTCTCTCCTGCCTGCCCTGCCTCAGCCAGGCCCTGAGATGGGGGAAAACGGGCAGTCTGCT | |
| | CTGCTGCTCTGACCTTCCAGAGCCCAAGGTCAGGGAGGGGCAACCAACTGCCCCAGGGGGATATGGGTCC | |
| | TCTGGGGCCTTCGGGACCCTGGGGCAGGGGTGCTTCCTCCTCAGGCCCAGCTGCTCCCCTGGAGGACAGA | |
| | GGGAGACAGGGCTGCTCCCCAACACCTGCCTCTGACCCCAGCATTTCCAGAGCAGAGCCTACAGAAGGGC | |
| | AGTGACTCGACAAAGGCCACAGGCAGTCCAGGCCTCTCTCTGCTCCATCCCCCTGCCTCCCATTCTGCAC | |
| | CACACCTGGCATGGTGCAGGGAGACATCTGCACCCCTGAGTTGGGCAGCCAGGAGTGCCCCCGGGAATGG | |
| | ATAATAAAGATACTAGAGAACTGA | |
| NAT1 | ACTTCCTCATAGACCTTGGATGTGGGAGGATTGCATTCAGTCTAGTTCCTGGTTGCCGGCTGAAATAACC | 153 |
| NM_001160170.1 | TGACCGAGAGCATCACCCCCTGAACATGGACTTGCAGAATTCCACAGAAGAGAGGAGACTGGCCTAGACA | |
| | GACAGCCCCAGGAGCTGAGGGCCCAACAGGCTTTCTACCCTGGATGCTGCTCCCATGCCCTGACATGAGG | |
| | CCCACTACAATGCTCTCCAAAATGTCCACAAAAGTGACTTAAGTCAGGTTCCCCCAAACCAGACACCAAG | |
| | ACAAGAATCCATGTGTGTGTGACTGAAGGAAGTGCTGGGAGAGCCCCAGCTGCAGCCTGGATGTGAACTG | |
| | CAACTCCAAAGTGTGTCCAGACTCAAGGCAAGGGCACTAGGCTTTCCAGACCTCCTACTAAGTCATTGAT | |
| | CCAGCACTGCCCTGCCAGGACATAAATCCCTGGCACCTCTTGCTCTCTGCAAAGGAGGGCAAAGCAGCTT | |
| | CAGGAGCCCTTGGGAGTCCTCCAAAGAGAGTCTAGGGTACAGGTCCGAAAGTAGAAGAACACAGAAGGCA | |
| | GGCCAGGGGCACTGTGAGATGGTAAAAGAGATCTGAAGGGATCCAGAATTCAAGCCAGGAAGAAGCAGCA | |
| | ATCTGTCTTCTGGATTAAAACTGAAGATCAACCTACTTTCAACTTACTAAGAAAGGGGATCATGGACATT | |
| | GAAGCATATCTTGAAAGAATTGGCTATAAGAAGTCTAGGAACAAATTGGACTTGGAAACATTAACTGACA | |
| | TTCTTCAACACCAGATCCGAGCTGTTCCCTTTGAGAACCTTAACATCCATTGTGGGGATGCCATGGACTT | |
| | AGGCTTAGAGGCCATTTTTGATCAAGTTGTGAGAAGAAATCGGGGTGGATGGTGTCTCCAGGTCAATCAT | |
| | CTTCTGTACTGGGCTCTGACCACTATTGGTTTTGAGACCACGATGTTGGGAGGGTATGTTTACAGCACTC | |
| | CAGCCAAAAAATACAGCACTGGCATGATTCACCTTCTCCTGCAGGTGACCATTGATGGCAGGAACTACAT | |
| | TGTCGATGCTGGGTTTGGACGCTCATACCAGATGTGGCAGCCTCTGGAGTTAATTTCTGGGAAGGATCAG | |
| | CCTCAGGTGCCTTGTGTCTTCCGTTTGACGGAAGAGAATGGATTCTGGTATCTAGACCAAATCAGAAGGG | |
| | AACAGTACATTCCAAATGAAGAATTTCTTCATTCTGATCTCCTAGAAGACAGCAAATACCGAAAAATCTA | |
| | CTCCTTTACTCTTAAGCCTCGAACAATTGAAGATTTTGAGTCTATGAATACATACCTGCAGACATCTCCA | |
| | TCATCTGTGTTTACTAGTAAATCATTTTGTTCCTTGCAGACCCCAGATGGGGTTCACTGTTTGGTGGGCT | |
| | TCACCCTCACCCATAGGAGATTCAATTATAAGGACAATACAGATCTAATAGAGTTCAAGACTCTGAGTGA | |
| | GGAAGAAATAGAAAAAGTGCTGAAAAATATATTTAATATTTCCTTGCAGAGAAAGCTTGTGCCCAAACAT | |
| | GGTGATAGATTTTTTACTATTTAGAATAAGGAGTAAAACAATCTTGTCTATTTGTCATCCAGCTCACCAG | |
| | TTATCAACTGACGACCTATCATGTATCTTCTGTACCCTTACCTTATTTTGAAGAAAATCCTAGACATCAA | |
| | ATCATTTCACCTATAAAAATGTCATCATATATAATTAAACAGCTTTTTAAAGAAACATAACCACAAACCT | |
| | TTTCAAATAATAATAATAATAATAATAAAAAATGTATTTTAAAGATGGCCTGTGGTTATCTTGGAAATTG | |
| | GTGATTTATGCTAGAAAGCTTTTAATGTTGGTTTATTGTTGAATTCCTAGAAAAGTTTTATTGGTAGATG | |
| | AGTAAATAAAATATTGTAAAAAAACTTATTGTCTATAAAGTATATTAAAACATTGTTGGCTAATATAATT | |
| | TGAAAAAAAGTGGTTTTTTGGAAGACTTAGGATATTATGGTGCTACATAATTTTTCCTCGATGCTCTCTT | |
| | CCTCTCATCTTTCTTGTCTCTTAAATTGCTTTACTTCCTTGCACACTTTGCCATACAAGAATGAACATGA | |
| | GCTTTTCTTGTGTAGATCTGAGTTGAAATCCTGTGGACACTGGGCGAATTACTTTTTAGATCTGTAGCTC | |
| | TGACTCCTCAGGCATAAAATGGGAATAATGCTTTTACAGTTTAGTGGCGGAACTAAACTCCCAAAATTAT | |
| | TTGTTATATGGATCAAGTAATAACGTCAGTAATGTTTTTGGTACAAAGTCATTATTTAATAAAAGTTATT | |
| | GTTCCATCTTGCTTGCCCCCCCAAAAAAAAAAAAAAAAA | |
| KIAA1324 | AGAGAGGAGGCGGTTGTCAAGGCGACGTGGGTAGGAGGAGAGGACAGAGGGAGGAGGAAGGATGGGCGGT | 154 |
| NM_020775.4 | GTTGGCGTAGCCGCAGGGAGGTGACTGAAGCGAGCCTGGCCTCTTGCATCCTCCGCCTGTGTACCTCCCT | |
| | CCCCTTTTTTTCCGCCTTCTGCCAGCAGAAGCAGCAGCCGCAGCACCTGAGCCGCTACTGCCGCTCACTC | |
| | AGGACAACGCTATGGCTGAGCCTGGGCACAGCCACCATCTCTCCGCCAGAGTCAGGGGAAGAACTGAGAG | |
| | GCGCATACCCCGGCTGTGGCGGCTGCTGCTCTGGGCTGGGACCGCCTTCCAGGTGACCCAGGGAACGGGA | |
| | CCGGAGCTTCATGCCTGCAAAGAGTCTGAGTACCACTATGAGTACACGGCGTGTGACAGCACGGGTTCCA | |
| | GGTGGAGGGTCGCCGTGCCGCATACCCCGGGCCTGTGCACCAGCCTGCCTGACCCCGTCAAGGGCACCGA | |
| | GTGCTCCTTCTCCTGCAACGCCGGGGAGTTTCTGGATATGAAGGACCAGTCATGTAAGCCATGCGCTGAG | |
| | GGCCGCTACTCCCTCGGCACAGGCATTCGGTTTGATGAGTGGGATGAGCTGCCCCATGGCTTTGCCAGCC | |
| | TCTCAGCCAACATGGAGCTGGATGACAGTGCTGCTGAGTCCACCGGGAACTGTACTTCGTCCAAGTGGGT | |
| | TCCCCGGGGCGACTACATCGCCTCCAACACGGACGAATGCACAGCCACACTGATGTACGCCGTCAACCTG | |
| | AAGCAATCTGGCACCGTTAACTTCGAATACTACTATCCAGACTCCAGCATCATCTTTGAGTTTTTCGTTC | |
| | AGAATGACCAGTGCCAGCCCAATGCAGATGACTCCAGGTGGATGAAGACCACAGAGAAAGGATGGGAATT | |
| | CCACAGTGTGGAGCTAAATCGAGGCAATAATGTCCTCTATTGGAGAACCACAGCCTTCTCAGTATGGACC | |
| | AAAGTACCCAAGCCTGTGCTGGTGAGAAACATTGCCATAACAGGGGTGGCCTACACTTCAGAATGCTTCC | |
| | CCTGCAAACCTGGCACGTATGCAGACAAGCAGGGCTCCTCTTTCTGCAAACTTTGCCCAGCCAACTCTTA | |
| | TTCAAATAAAGGAGAAACTTCTTGCCACCAGTGTGACCCTGACAAATACTCAGAGAAAGGATCTTCTTCC | |
| | TGTAACGTGCGCCCAGCTTGCACAGACAAAGATTATTTCTACACACACACGGCCTGCGATGCCAACGGAG | |
| | AGACACAACTCATGTACAAATGGGCCAAGCCGAAAATCTGTAGCGAGGACCTTGAGGGGGCAGTGAAGCT | |
| | GCCTGCCTCTGGTGTGAAGACCCACTGCCCACCCTGCAACCCAGGCTTCTTCAAAACCAACAACAGCACC | |
| | TGCCAGCCCTGCCCATATGGTTCCTACTCCAATGGCTCAGACTGTACCCGCTGCCCTGCAGGGACTGAAC | |
| | CTGCTGTGGGATTTGAATACAAATGGTGGAACACGCTGCCCACAAACATGGAAACGACCGTTCTCAGTGG | |
| | GATCAACTTCGAGTACAAGGGCATGACAGGCTGGGAGGTGGCTGGTGATCACATTTACACAGCTGCTGGA | |
| | GCCTCAGACAATGACTTCATGATTCTCACTCTGGTTGTGCCAGGATTTAGACCTCCGCAGTCGGTGATGG | |
| | CAGACACAGAGAATAAAGAGGTGGCCAGAATCACATTTGTCTTTGAGACCCTCTGTTCTGTGAACTGTGA | |
| | GCTCTACTTCATGGTGGGTGTGAATTCTAGGACCAACACTCCTGTGGAGACGTGGAAAGGTTCCAAAGGC | |
| | AAACAGTCCTATACCTACATCATTGAGGAGAACACTACCACGAGCTTCACCTGGGCCTTCCAGAGGACCA | |
| | CTTTTCATGAGGCAAGCAGGAAGTACACCAATGACGTTGCCAAGATCTACTCCATCAATGTCACCAATGT | |
| | TATGAATGGTGTGGCCTCCTACTGCCGTCCCTGTGCCCTAGAAGCCTCTGATGTGGGCTCCTCCTGCACC | |
| | TCTTGTCCTGCTGGTTACTATATTGACCGAGATTCAGGAACCTGCCACTCCTGCCCCACTAACACAATTC | |
| | TGAAAGCCCACCAGCCTTATGGTGTCCAGGCCTGTGTGCCCTGTGGTCCAGGGACCAAGAACAACAAGAT | |
| | CCACTCTCTGTGCTACAACGATTGCACCTTCTCACGCAACACTCCGACCAGGACTTTCAACTACAACTTC | |
| | TCCGCTTTGGCAAACACTGTCACTCTTGCTGGAGGGCCAAGCTTCACTTCCAAAGGGCTGAAATACTTCC | |
| | ATCACTTTACCCTCAGTCTCTGTGGAAACCAGGGTAGGAAAATGTCTGTGTGCACCGACAATGTCACTGA | |
| | CCTCCGGATTCCTGAGGGTGAGTCAGGGTTCTCCAAATCTATCACAGCCTACGTCTGCCAGGCAGTCATC | |
| | ATCCCCCCAGAGGTGACAGGCTACAAGGCCGGGGTTTCCTCACAGCCTGTCAGCCTTGCTGATCGACTTA | |
| | TTGGGGTGACAACAGATATGACTCTGGATGGAATCACCTCCCCAGCTGAACTTTTCCACCTGGAGTCCTT | |
| | GGGAATACCGGACGTGATCTTCTTTTATAGGTCCAATGATGTGACCCAGTCCTGCAGTTCTGGGAGATCA | |
| | ACCACCATCCGCGTCAGGTGCAGTCCACAGAAAACTGTCCCTGGAAGTTTGCTGCTGCCAGGAACGTGCT | |
| | CGGATGGGACCTGTGATGGCTGCAACTTCCACTTCCTGTGGGAGAGCGCGGCTGCTTGCCCGCTCTGCTC | |
| | AGTGGCTGACTACCATGCTATCGTCAGCAGCTGTGTGGCTGGGATCCAGAAGACTACTTACGTGTGGCGA | |
| | GAACCCAAGCTATGCTCTGGTGGCATTTCTCTGCCTGAGCAGAGAGTCACCATCTGCAAAACCATAGATT | |
| | TCTGGCTGAAAGTGGGCATCTCTGCAGGCACCTGTACTGCCATCCTGCTCACCGTCTTGACCTGCTACTT | |
| | TTGGAAAAAGAATCAAAAACTAGAGTACAAGTACTCCAAGCTGGTGATGAATGCTACTCTCAAGGACTGT | |
| | GACCTGCCAGCAGCTGACAGCTGCGCCATCATGGAAGGCGAGGATGTAGAGGACGACCTCATCTTTACCA | |
| | GCAAGAAGTCACTCTTTGGGAAGATCAAATCATTTACCTCCAAGAGGACTCCTGATGGATTTGACTCAGT | |
| | GCCGCTGAAGACATCCTCAGGAGGCCTAGACATGGACCTGTGAGAGGCACTGCCTGCCTCACCTGCCTCC | |
| | TCACCTTGCATAGCACCTTTGCAAGCCTGCGGCGATTTGGGTGCCAGCATCCTGCAACACCCACTGCTGG | |
| | AAATCTCTTCATTGTGGCCTTATCAGATGTTTGAATTTCAGATCTTTTTTTATAGAGTACCCAAACCCTC | |
| | CTTTCTGCTTGCCTCAAACCTGCCAAATATACCCACACTTTGTTTGTAAATTATGCCCTTGCTTGTATCT | |
| | TGTTTCCCAAAATGGCCCATCCGCCAGAGCCATAGCTTCGTCTGCTCATAATTCTTATAGCTTTGGAATG | |
| | AAAATATTTCTATCTTCTTAAGTATAGAAACTATTTCCTCTGTCCTCTAACTTAAGGGCAGAAACAGCTG | |
| | GGAGTTTTCCTCGCATGCCCTCAGCTCATGATCTCTTCAGGAGAGAGGCTGGGTGAGGAGGGTGTCGGGG | |
| | TTCCCTGGTGGATAATCTTCATAGCAGCCTGGATCCATTTCCCCTGGATAACCAGCTCAAAGGGAGTGAA | |
| | AATGGTAGTCTGAGGGCAAGGGGAGCAAGGCCTGGGTAAGAAAAGCCTTGAAAAGCATAAAAAGAGGCCG | |
| | GGCGCGGTGGCTCACGCCTGTAATCCCAGCACTTTGGGAGGCCGAGGCGGGCAGATCATGAGGTCGGGAG | |
| | ATTGAGACCATCCTGGCTAACACGGTGAAACCCCGTCTCTACTAAAAATACAAAAAATTAGCCGGGCGTG | |
| | GTGGCGGGTGCCTGTAGTCCCAGCTACTCGGGAGGCTGAGGCGGGAGAATAGCGTGAACCTGGAAGGCGG | |
| | AGCTTGCAGTGAGCCGAGATCGCGCCACTGCACTCCATCCAGCCTGGGTGACAGAGTGAGACTCTGCCTC | |
| | AAAAAAAAAAAAAAAAAAAAAGAAAAGCACAAAGAGAGGCAACAAGGAATGTTTTTGTTTTTGAGACAGG | |
| | CTCTCACTCTGTCACCTAGGCTGGAGTGCAGTGGCATAATCACTGTTCAGTGCAGCCTCAAGCTCTTGGG | |
| | CTCAAGCTATCCTCCCATCTCAACCTCTCAAGTAGCTAGGACTACAAGTGTGCACCACCAGGCTCACTAA | |
| | TTTTTATATTTTTTGTAGACACAGGGTTTCACCATGTTGCCCAGGCTGGTCTCCAACTCCTGGGCTCAAG | |
| | TGATCTGTCCGCCTCAGCCTCCCAAACTGCTGGGATTACAGGCATAAGCCACTGCACTCAGCCTTTTATT | |
| | TGTTTTTTAAACCACGTAGCTCATTGCCTTCTCTTAAGTAAATGATAGATATTCTCACTGAAGCCAAAGG | |
| | AATAAGTTCATCAAGAAAATGCCCAAAGCCCTGGTGGATACATCCTCCCTATCTTTTTTTTAAACCTTCC | |
| | ACTATCACTCTATGACACTGAAAAGAACCAGGTAAGCCCCAAACCCAGATGTTCCAGCCTTATCCTCTGT | |
| | TGGGTTTACCCACAGACATAGCAAACCCTGTCAGTGAGGAAAATTCCCCATCCTTGAGTGCCCCCGTCCT | |
| | AGAAGTTTGGGCCATATTATGGAACAGGGGTCTCTTATTTGAAAAGAGCACAAGGAGGCCAAGATTTTAA | |
| | TGGGGCACTTTAGGGGATACAGCCCACAATGGCATGGGCCTGAGGTGGCCGTGATGTCTGCTTCTAAGCT | |
| | TAACGCATCTGCTCAGGCACAGAATAAACGTCTAGGCTGGCCAAAAAAGGAACTGAATCCCAGGCCCATA | |
| | CGCCAGCACCAGAATCAAACCAGTCTTCAAGGAAGGAAGGCTAGGAGAGTTTAACAAGATTTTCACTGGG | |
| | CCCAGCATGGTGGCTCACACCTGTAATCCCAAGGCAGAATGGTGGCTTGAGCTCAGGAGTTCAAGACCAG | |
| | CCTGGGCAACACAGTGAGACCCTGTCTCTAAAAAATTTAAAAATAAACAAGGTGTTCACCAAGCTGGGAT | |
| | ACTTCTCACTATTAAGCCCCTATCTTTCTCTTTTTTTCATTCTCAATTGCTTTGTGTGATAAAAAACTAA | |
| | AGAGACTTCTGGTCCAATTTCTGGCAACATCCCTTCTGAAAGGTGAGTAGAGTGGGTGTCTTCTATGCCC | |
| | ATTTTCCCCAATTTTACACAAACTATTATCAATGAACTTTTAAGTACCTAGAATGGGTAAAACCAGAGCA | |
| | AGACTTTAAATTACCTTCTTCTTTCTTCTACTGGCAGTTCTGCCTCCATCACTATCAGGCTAGGGTGACC | |
| | TTCCCTTGGTCAAGCCCCAATTGCCCATGATTTGTGCCTGTGCCCTTTCTCCAGTGACCATTTGGTGACC | |
| | AGATGGTAGATATAGAAAGGGGATGGCATTTGCAAGTGACTAGTCTGCCACAAAATGCTCATCTGATTAG | |
| | CCACTGCTGCCCTGGCAATGGCTTTGTAAGAGTCAATGAGAACTAGAGCCAGGCTGTGGTCCCTGGCCAT | |
| | CAACAGTGTTGGTGACGGCAGGGAGTCCCTTTGGTTTAATAAATCCAGTTTTTCTTTGGGTATCCAAATT | |
| | CTCCCCTCCTTTTGTAGGAGTCAGGCTCTCAGAACCTGTGTCCATGTTGGAACTTCCCCCAGTGTGGATG | |
| | CAGATACGCAGCTCCTGAGCTCCAGCCTAAAGTCTTCTGTAGCCTCAGCAATACTTGGGCACCTGCTGTC | |
| | TCACTGAATAGCTTTCTTTTGTGACAAAGGCCACAGACAGCCCTTAGACTATTCCGGAAACAGTAGGAAA | |
| | AATTACATATGTCTTTGACTTCTTTATTCTGACTCCACTGATTTTAGCCATAATACTTTAAGGAGCTACT | |
| | TTTTACTACCCCTTACCGTGCTGACTTCTGCAGGTCTGCCCTGTGACCTGTCAGGAACTCCTGAGTTACG | |
| | CTACTGGGGTCACCTGTTGCTCCCCTAGCAAGTTAGGCATGTCATATATTTTTAACAGCTTTATTGAGAT | |
| | ATAATTCACATATTACACAATTCACCTTTAAAACATACGATTCAATGGTTTTCAGCAAACTCACAGAGTT | |
| | GTCCGCCCACTTGAGAGCAAACACATGTTCAATTTTCTTTTCCTTTTTTTTTTTGAGACAGAGTCAGCTT | |
| | TGTTGCCCAGGCTGGAGTGCAGTGCCATGATCTTGGCTCACTGCAGCCTCCCCATCCTGGGTTCAAGTGA | |
| | TCCTTCTGCTTCAGCCTCCCCAGTAGCTGGGATTACAAGCATGCGCCACCACGCCTAGCTAATTTTTGTG | |
| | TTTTTAGTAGAGATGGGGTTTCACCATGTTGGCCAGGCTGGTCTCAAACTCCTGGACTCAAGTGATCCAC | |
| | CCACCTCGGCCTCCCAAAGTGCTGGGATTACAGGTGTAAGCCACCGTGCCTGGCCTACATGTTCAATTTT | |
| | CTATGAACAAAGGCTTTAGTCCTTGACCCAGGGCTAAAGTGGTCTGTCCAAGCTGTTGTTGGTAGAGGGA | |
| | GTATGATAAAATGTTTAAATCTCATTTGGTTACCTTGAGTCCTGGAACATGCAGTAACTGTCATGCTATA | |
| | GACATCATCTGTATTTGGCTGGGAATACAAATGAAGATTGTGGTGTATTCAAGCAGTAGGGTTTTTGCTT | |
| | TTGTTTTTGTTTTAGTGCCAACAAAACTTTTTTTTGTCTGACTACATTAAAGATAAGACTGACTATATTT | |
| | ATACAACAGAAACTTTGTAATAGATTTTTTCAGCTTTGTGAAATCGAATTTTTTTTCATCAGGGCTGGTT | |
| | GGATTTCCTTTTTACCCTGTAATCCAAGCGTTAATAGTTTGTTAGAAGATGGGTTATTGCATGTCACTTT | |
| | TTTTTTTTGTAAAATAAAAACATACCTTACAAAAAAAAAAAAAAAAAAAAAAAA | |
| TSPAN13 | AGGGGCTGGGCGGGGCTCGGGCTCCTGCTCCGGCTCAGCTGCGGCGGCCGCAGGTTCCAAAGCGGGTCCG | 155 |
| NM_014399.3 | AGCCGCCGCCGCGCGCGCGCCGCGCACTGCAGCCCCAGGCCCCGGCCCCCCACCCACGTCTGCGTTGCTG | |
| | CCCCGCCTGGGCCAGGCCCCAAAGGCAAGGACAAAGCAGCTGTCAGGGAACCTCCGCCGGAGTCGAATTT | |
| | ACGTGCAGCTGCCGGCAACCACAGGTTCCAAGATGGTTTGCGGGGGCTTCGCGTGTTCCAAGAACTGCCT | |
| | GTGCGCCCTCAACCTGCTTTACACCTTGGTTAGTCTGCTGCTAATTGGAATTGCTGCGTGGGGCATTGGC | |
| | TTCGGGCTGATTTCCAGTCTCCGAGTGGTCGGCGTGGTCATTGCAGTGGGCATCTTCTTGTTCCTGATTG | |
| | CTTTAGTGGGTCTGATTGGAGCTGTAAAACATCATCAGGTGTTGCTATTTTTTTATATGATTATTCTGTT | |
| | ACTTGTATTTATTGTTCAGTTTTCTGTATCTTGCGCTTGTTTAGCCCTGAACCAGGAGCAACAGGGTCAG | |
| | CTTCTGGAGGTTGGTTGGAACAATACGGCAAGTGCTCGAAATGACATCCAGAGAAATCTAAACTGCTGTG | |
| | GGTTCCGAAGTGTTAACCCAAATGACACCTGTCTGGCTAGCTGTGTTAAAAGTGACCACTCGTGCTCGCC | |
| | ATGTGCTCCAATCATAGGAGAATATGCTGGAGAGGTTTTGAGATTTGTTGGTGGCATTGGCCTGTTCTTC | |
| | AGTTTTACAGAGATCCTGGGTGTTTGGCTGACCTACAGATACAGGAACCAGAAAGACCCCCGCGCGAATC | |
| | CTAGTGCATTCCTTTGATGAGAAAACAAGGAAGATTTCCTTTCGTATTATGATCTTGTTCACTTTCTGTA | |
| | ATTTTCTGTTAAGCTCCATTTGCCAGTTTAAGGAAGGAAACACTATCTGGAAAAGTACCTTATTGATAGT | |
| | GGAATTATATATTTTTACTCTATGTTTCTCTACATGTTTTTTTCTTTCCGTTGCTGAAAAATATTTGAAA | |
| | CTTGTGGTCTCTGAAGCTCGGTGGCACCTGGAATTTACTGTATTCATTGTCGGGCACTGTCCACTGTGGC | |
| | CTTTCTTAGCATTTTTACCTGCAGAAAAACTTTGTATGGTACCACTGTGTTGGTTATATGGTGAATCTGA | |
| | ACGTACATCTCACTGGTATAATTATATGTAGCACTGTGCTGTGTAGATAGTTCCTACTGGAAAAAGAGTG | |
| | GAAATTTATTAAAATCAGAAAGTATGAGATCCTGTTATGTTAAGGGAAATCCAAATTCCCAATTTTTTTT | |
| | GGTCTTTTTAGGAAAGATTGTTGTGGTAAAAAGTGTTAGTATAAAAATGATAATTTACTTGTAGTCTTTT | |
| | ATGATTACACCAATGTATTCTAGAAATAGTTATGTCTTAGGAAATTGTGGTTTAATTTTTGACTTTTACA | |
| | GGTAAGTGCAAAGGAGAAGTGGTTTCATGAAATGTTCTAATGTATAATAACATTTACCTTCAGCCTCCAT | |
| | CAGAATGGAACGAGTTTTGAGTAATCAGGAAGTATATCTATATGATCTTGATATTGTTTTATAATAATTT | |
| | GAAGTCTAAAAGACTGCATTTTTAAACAAGTTAGTATTAATGCGTTGGCCCACGTAGCAAAAAGATATTT | |
| | GATTATCTTAAAAATTGTTAAATACCGTTTTCATGAAATTTCTCAGTATTGTAACAGCAACTTGTCAAAC | |
| | CTAAGCATATTTGAATATGATCTCCCATAATTTGAAATTGAAATCGTATTGTGTGGCTCTGTATATTCTG | |
| | TTAAAAAATTAAAGGACAGAAACCTTTCTTTGTGTATGCATGTTTGAATTAAAAGAAAGTAATGGAAGAA | |
| | TTGATCGATGAAAAAAAAAAAA | |
| MAD2L1 | CGCAAAGGACCTGACGACGTGCTGCGTCGTTACTTTTGAAACGCTTGGCGGGGAAGTGCTGTTGGAGCCG | 156 |
| NM_002358.3 | CTGTGGTTGCTGTCCGCGGAGTGGAAGCGCGTGCTTTTGTTTGTGTCCCTGGCCATGGCGCTGCAGCTCT | |
| | CCCGGGAGCAGGGAATCACCCTGCGCGGGAGCGCCGAAATCGTGGCCGAGTTCTTCTCATTCGGCATCAA | |
| | CAGCATTTTATATCAGCGTGGCATATATCCATCTGAAACCTTTACTCGAGTGCAGAAATACGGACTCACC | |
| | TTGCTTGTAACTACTGATCTTGAGCTCATAAAATACCTAAATAATGTGGTGGAACAACTGAAAGATTGGT | |
| | TATACAAGTGTTCAGTTCAGAAACTGGTTGTAGTTATCTCAAATATTGAAAGTGGTGAGGTCCTGGAAAG | |
| | ATGGCAGTTTGATATTGAGTGTGACAAGACTGCAAAAGATGACAGTGCACCCAGAGAAAAGTCTCAGAAA | |
| | GCTATCCAGGATGAAATCCGTTCAGTGATCAGACAGATCACAGCTACGGTGACATTTCTGCCACTGTTGG | |
| | AAGTTTCTTGTTCATTTGATCTGCTGATTTATACAGACAAAGATTTGGTTGTACCTGAAAAATGGGAAGA | |
| | GTCGGGACCACAGTTTATTACCAATTCTGAGGAAGTCCGCCTTCGTTCATTTACTACTACAATCCACAAA | |
| | GTAAATAGCATGGTGGCCTACAAAATTCCTGTCAATGACTGAGGATGACATGAGGAAAATAATGTAATTG | |
| | TAATTTTGAAATGTGGTTTTCCTGAAATCAAGTCATCTATAGTTGATATGTTTTATTTCATTGGTTAATT | |
| | TTTACATGGAGAAAACCAAAATGATACTTACTGAACTGTGTGTAATTGTTCCTTTTATTTTTTTGGTACC | |
| | TATTTGACTTACCATGGAGTTAACATCATGAATTTATTGCACATTGTTCAAAAGGAACCAGGAGGTTTTT | |
| | TTGTCAACATTGTGATGTATATTCCTTTGAAGATAGTAACTGTAGATGGAAAAACTTGTGCTATAAAGCT | |
| | AGATGCTTTCCTAAATCAGATGTTTTGGTCAAGTAGTTTGACTCAGTATAGGTAGGGAGATATTTAAGTA | |
| | TAAAATACAACAAAGGAAGTCTAAATATTCAGAATCTTTGTTAAGGTCCTGAAAGTAACTCATAATCTAT | |
| | AAACAATGAAATATTGCTGTATAGCTCCTTTTGACCTTCATTTCATGTATAGTTTTCCCTATTGAATCAG | |
| | TTTCCAATTATTTGACTTTAATTTATGTAACTTGAACCTATGAAGCAATGGATATTTGTACTGTTTAATG | |
| | TTCTGTGATACAGAACTCTTAAAAATGTTTTTTCATGTGTTTTATAAAATCAAGTTTTAAGTGAAAGTGA | |
| | GGAAATAAAGTTAAGTTTGTTTTAAATTTGTCTTAAAAAAAAAAAAAAAAAAA | |
| NEK2 | GCGACGGTTAAACGGGGCCCAAGGCAGGGGTGGCGGGTCAGTGCTGCTCGGGGGCTTCTCCATCCAGGTC | 157 |
| NM_002497.3 | CCTGGAGTTCCTGGTCCCTGGAGCTCCGCACTTGGCGGCGCAACCTGCGTGAGGCAGCGCGACTCTGGCG | |
| | ACTGGCCGGCCATGCCTTCCCGGGCTGAGGACTATGAAGTGTTGTACACCATTGGCACAGGCTCCTACGG | |
| | CCGCTGCCAGAAGATCCGGAGGAAGAGTGATGGCAAGATATTAGTTTGGAAAGAACTTGACTATGGCTCC | |
| | ATGACAGAAGCTGAGAAACAGATGCTTGTTTCTGAAGTGAATTTGCTTCGTGAACTGAAACATCCAAACA | |
| | TCGTTCGTTACTATGATCGGATTATTGACCGGACCAATACAACACTGTACATTGTAATGGAATATTGTGA | |
| | AGGAGGGGATCTGGCTAGTGTAATTACAAAGGGAACCAAGGAAAGGCAATACTTAGATGAAGAGTTTGTT | |
| | CTTCGAGTGATGACTCAGTTGACTCTGGCCCTGAAGGAATGCCACAGACGAAGTGATGGTGGTCATACCG | |
| | TATTGCATCGGGATCTGAAACCAGCCAATGTTTTCCTGGATGGCAAGCAAAACGTCAAGCTTGGAGACTT | |
| | TGGGCTAGCTAGAATATTAAACCATGACACGAGTTTTGCAAAAACATTTGTTGGCACACCTTATTACATG | |
| | TCTCCTGAACAAATGAATCGCATGTCCTACAATGAGAAATCAGATATCTGGTCATTGGGCTGCTTGCTGT | |
| | ATGAGTTATGTGCATTAATGCCTCCATTTACAGCTTTTAGCCAGAAAGAACTCGCTGGGAAAATCAGAGA | |
| | AGGCAAATTCAGGCGAATTCCATACCGTTACTCTGATGAATTGAATGAAATTATTACGAGGATGTTAAAC | |
| | TTAAAGGATTACCATCGACCTTCTGTTGAAGAAATTCTTGAGAACCCTTTAATAGCAGATTTGGTTGCAG | |
| | ACGAGCAAAGAAGAAATCTTGAGAGAAGAGGGCGACAATTAGGAGAGCCAGAAAAATCGCAGGATTCCAG | |
| | CCCTGTATTGAGTGAGCTGAAACTGAAGGAAATTCAGTTACAGGAGCGAGAGCGAGCTCTCAAAGCAAGA | |
| | GAAGAAAGATTGGAGCAGAAAGAACAGGAGCTTTGTGTTCGTGAGAGACTAGCAGAGGACAAACTGGCTA | |
| | GAGCAGAAAATCTGTTGAAGAACTACAGCTTGCTAAAGGAACGGAAGTTCCTGTCTCTGGCAAGTAATCC | |
| | AGAACTTCTTAATCTTCCATCCTCAGTAATTAAGAAGAAAGTTCATTTCAGTGGGGAAAGTAAAGAGAAC | |
| | ATCATGAGGAGTGAGAATTCTGAGAGTCAGCTCACATCTAAGTCCAAGTGCAAGGACCTGAAGAAAAGGC | |
| | TTCACGCTGCCCAGCTGCGGGCTCAAGCCCTGTCAGATATTGAGAAAAATTACCAACTGAAAAGCAGACA | |
| | GATCCTGGGCATGCGCTAGCCAGGTAGAGAGACACAGAGCTGTGTACAGGATGTAATATTACCAACCTTT | |
| | AAAGACTGATATTCAAATGCTGTAGTGTTGAATACTTGGTTCCATGAGCCATGCCTTTCTGTATAGTACA | |
| | CATGATATTTCGGAATTGGTTTTACTGTTCTTCAGCAACTATTGTACAAAATGTTCACATTTAATTTTTC | |
| | TTTCTTCTTTTAAGAACATATTATAAAAAGAATACTTTCTTGGTTGGGCTTTTAATCCTGTGTGTGATTA | |
| | CTAGTAGGAACATGAGATGTGACATTCTAAATCTTGGGAGAAAAAATAATGTTAGGAAAAAAATATTTAT | |
| | GCAGGAAGAGTAGCACTCACTGAATAGTTTTAAATGACTGAGTGGTATGCTTACAATTGTCATGTCTAGA | |
| | TTTAAATTTTAAGTCTGAGATTTTAAATGTTTTTGAGCTTAGAAAACCCAGTTAGATGCAATTTGGTCAT | |
| | TAATACCATGACATCTTGCTTATAAATATTCCATTGCTCTGTAGTTCAAATCTGTTAGCTTTGTGAAAAT | |
| | TCATCACTGTGATGTTTGTATTCTTTTTTTTTTTCTGTTTAACAGAATATGAGCTGTCTGTCATTTACCT | |
| | ACTTCTTTCCCACTAAATAAAAGAATTCTTCAGTTTCCCTGTAAAAAAAAAAAAAAAAAAA | |
| NPDC1 | GCGCAGGCGCAGTCTCCGCGTGCGCGCCTCGCCGGCGCCTCCATCCCGGATCCTTGCTGCAGCGTCAGCG | 158 |
| NM_015392.3 | CCGCCGCCCGTGCCTTTCCTCTTCCTCCTCCTCCTCCTTGGCATCCGCCTCTTCTTCCTCCTGCGTCCTC | |
| | CCCCGCTGCCTCCGCTGCTCCCGACGCGGAGCCCGGAGCCCGCGCCGAGCCCCTGGCCTCGCGGTGCCAT | |
| | GCTGCCCCGGCGGCGGCGCTGAAGGATGGCGACGCCGCTGCCTCCGCCCTCCCCGCGGCACCTGCGGCTG | |
| | CTGCGGCTGCTGCTCTCCGGCCTCGTCCTCGGCGCCGCCCTGCGTGGAGCCGCCGCCGGCCACCCGGATG | |
| | TAGCCGCCTGTCCCGGGAGCCTGGACTGTGCCCTGAAGAGGCGGGCAAGGTGTCCTCCTGGTGCACATGC | |
| | CTGTGGGCCCTGCCTTCAGCCCTTCCAGGAGGACCAGCAAGGGCTCTGTGTGCCCAGGATGCGCCGGCCT | |
| | CCAGGCGGGGGCCGGCCCCAGCCCAGACTGGAAGATGAGATTGACTTCCTGGCCCAGGAGCTTGCCCGGA | |
| | AGGAGTCTGGACACTCAACTCCGCCCCTACCCAAGGACCGACAGCGGCTCCCGGAGCCTGCCACCCTGGG | |
| | CTTCTCGGCACGGGGGCAGGGGCTGGAGCTGGGCCTCCCCTCCACTCCAGGAACCCCCACGCCCACGCCC | |
| | CACACCTCCCTGGGCTCCCCTGTGTCATCCGACCCGGTGCACATGTCGCCCCTGGAGCCCCGGGGAGGGC | |
| | AAGGCGACGGCCTCGCCCTTGTGCTGATCCTGGCGTTCTGTGTGGCCGGTGCAGCCGCCCTCTCCGTAGC | |
| | CTCCCTCTGCTGGTGCAGGCTGCAGCGTGAGATCCGCCTGACTCAGAAGGCCGACTACGCCACTGCGAAG | |
| | GCCCCTGGCTCACCTGCAGCTCCCCGGATCTCGCCTGGGGACCAGCGGCTGGCACAGAGCGCGGAGATGT | |
| | ACCACTACCAGCACCAACGGCAACAGATGCTGTGCCTGGAGCGGCATAAAGAGCCACCCAAGGAGCTGGA | |
| | CACGGCCTCCTCGGATGAGGAGAATGAGGACGGAGACTTCACGGTGTACGAGTGCCCGGGCCTGGCCCCG | |
| | ACCGGGGAAATGGAGGTGCGCAACCCTCTGTTCGACCACGCCGCACTGTCCGCGCCCCTGCCGGCCCCCA | |
| | GCTCACCGCCTGCACTGCCATGACCTGGAGGCAGACAGACGCCCACCTGCTCCCCGACCTCGAGGCCCCC | |
| | GGGGAGGGGCAGGGCCTGGAGCTTCCCACTAAAAACATGTTTTGATGCTGTGTGCTTTTGGCTGGGCCTC | |
| | GGGCTCCAGGCCCTGGGACCCCTTGCCAGGGAGACCCCCGAACCTTTGTGCCAGGACACCTCCTGGTCCC | |
| | CTGCACCTCTCCTGTTCGGTTTAGACCCCCAAACTGGAGGGGGCATGGAGAACCGTAGAGCGCAGGAACG | |
| | GGTGGGTAATTCTAGAGACAAAAGCCAATTAAAGTCCATTTCAGACCTGCGGCTTCTGAAAAAAAAAAAA | |
| | AAAAAAAA | |
| GPSM2 | AGGCGCAGAGGAGGGCGGTGTTGAGACCGGCGGAGCGGCGGGACCCCTAGGTGGCGGAGGGACGCTCCGG | 159 |
| NM_013296.4 | GAAAGCGAGGGGCGCTACGAGCTCTGGCCCACGTGACCTGCCGGGGGCGGGAGCAGGGGGCGCGCCGGCC | |
| | TCCTGCGGTGCCCCTGCCTTGGGGAGGGGCCGTGACCACCCGTCTGTCGCCCGAGGCGGCCGCCGCTGCA | |
| | CCTTCACCGCGTACCCGGGACCCGCCCGCCCGCGGGAGAAATGTTGCTGAAGTGCTGCTGAAAGGGCCAG | |
| | AGATGCAAGGATTTGGGATACATTTTGAACCTTTAAGCTGTCTGACATTGACCTCCTTTCATTATTAATA | |
| | AAGAAGAATCAGGAGCTTAGGATGTATTAACACCAACTCATTAATATACTAACCGGACAATGTTCTACAA | |
| | ACAATTCTACATTGTAAAGGACTGGATTGGCACAAAATAAAATAATTTTATTTTATTCAGCTTATAATAT | |
| | GACTCGATGGAGGAAAATTTGATAAGCATGAGAGAAGACCATTCTTTTCATGTTCGTTACAGAATGGAAG | |
| | CTTCTTGCCTAGAGCTGGCCTTGGAAGGGGAACGTCTATGTAAATCAGGAGACTGCCGCGCTGGCGTGTC | |
| | ATTCTTTGAAGCTGCAGTTCAAGTTGGAACTGAAGACCTAAAAACACTTAGCGCTATTTACAGCCAGTTG | |
| | GGCAATGCTTATTTCTATTTGCATGATTATGCCAAAGCATTAGAATATCACCATCATGATTTAACCCTTG | |
| | CAAGGACTATTGGAGACCAGCTGGGGGAAGCGAAAGCTAGTGGTAATCTGGGAAACACCTTAAAAGTTCT | |
| | TGGGAATTTTGACGAAGCCATAGTTTGTTGTCAGCGACACCTAGATATTTCCAGAGAGCTTAATGACAAG | |
| | GTGGGAGAAGCAAGAGCACTTTACAATCTTGGGAATGTGTATCATGCCAAAGGGAAAAGTTTTGGTTGCC | |
| | CTGGTCCCCAGGATGTAGGAGAATTTCCAGAAGAAGTGAGAGATGCTCTGCAGGCAGCCGTGGATTTTTA | |
| | TGAGGAAAACCTATCATTAGTGACTGCTTTGGGTGACCGAGCGGCACAAGGACGTGCCTTTGGAAATCTT | |
| | GGAAACACACATTACCTCCTTGGCAACTTCAGGGATGCAGTTATAGCTCATGAGCAGCGTCTCCTTATTG | |
| | CAAAAGAATTTGGAGATAAAGCAGCTGAAAGAAGAGCATATAGCAACCTTGGAAATGCATATATATTTCT | |
| | TGGTGAATTTGAAACTGCCTCGGAATACTACAAGAAGACACTACTGTTGGCCCGACAGCTTAAAGACCGA | |
| | GCTGTAGAAGCACAGTCTTGTTACAGTCTTGGAAATACATATACTTTACTTCAAGACTATGAAAAGGCCA | |
| | TTGATTATCATCTGAAGCACTTAGCAATTGCTCAAGAGCTGAATGATAGAATTGGTGAAGGAAGAGCATG | |
| | TTGGAGCTTAGGAAATGCATACACAGCACTAGGAAATCATGATCAAGCAATGCATTTTGCTGAAAAGCAC | |
| | TTGGAAATTTCAAGAGAGGTTGGGGATAAAAGTGGTGAACTAACAGCACGACTTAATCTCTCAGACCTTC | |
| | AAATGGTTCTTGGTCTGAGCTACAGCACAAATAACTCCATAATGTCTGAAAATACTGAAATTGATAGCAG | |
| | TTTGAATGGTGTACGCCCCAAGTTGGGACGCCGGCATAGTATGGAAAATATGGAACTTATGAAGTTAACA | |
| | CCAGAAAAGGTACAGAACTGGAACAGTGAAATTCTTGCTAAGCAAAAACCTCTTATTGCCAAACCTTCTG | |
| | CAAAGCTACTCTTTGTCAACAGACTGAAGGGGAAAAAATACAAAACGAATTCCTCCACTAAAGTTCTCCA | |
| | AGATGCCAGTAATTCTATTGACCACCGAATTCCAAATTCTCAGAGGAAAATCAGTGCAGATACTATTGGA | |
| | GATGAAGGGTTCTTTGACTTATTAAGCCGATTTCAAAGCAATAGGATGGATGATCAGAGATGTTGCTTAC | |
| | AAGAAAAGAACTGCCATACAGCTTCAACAACAACTTCTTCCACTCCCCCTAAAATGATGCTAAAAACATC | |
| | ATCTGTTCCTGTGGTATCCCCCAACACGGATGAGTTTTTAGATCTTCTTGCCAGCTCACAGAGTCGCCGT | |
| | CTGGATGACCAGAGGGCTAGTTTCAGTAATTTGCCAGGGCTTCGTCTAACACAAAACAGCCAGTCGGTAC | |
| | TTAGCCACCTGATGACTAATGACAACAAAGAGGCTGATGAAGATTTCTTTGACATCCTTGTAAAATGTCA | |
| | AGGATCCAGATTAGATGATCAAAGATGTGCTCCACCACCTGCTACCACAAAGGGTCCGACAGTACCAGAT | |
| | GAAGACTTTTTCAGCCTTATTTTACGGTCCCAGGGAAAGAGAATGGATGAACAGAGAGTTCTTTTACAAA | |
| | GAGATCAAAACAGAGACACTGACTTTGGGCTAAAGGACTTTTTGCAAAATAATGCTTTGTTGGAGTTTAA | |
| | AAATTCAGGGAAAAAATCGGCAGACCATTAGTTACTATGGATTTATTTTTTTTCCTTTCAAACACGGTAA | |
| | GGAAACAATCTATTACTTTTTTCCTTAAAAGGAGAATTTATAGCACTGTAATACAGCTTAAAATATTTTT | |
| | AGAATGATGTAAATAGTTAACCTTCAGTAGTCTATTAAGGCATTAATACTTCTCTGGACATGCGCGTTTG | |
| | AGGGTGGAGGGGTCCTGTAAGGTGCTTCATCGTCTGTGATTACTGCTTGGGATGTGTTCTTTGGCAGCTT | |
| | GTGAGATTACTTTACCTAGTGTTTATAAAGTAGGAAGTTAAGTGAATCATAGATTAGAATTTAATACTCT | |
| | TATGGAAATAATTTTTTAACATCTTAATTGACAATGGCGTTTTTTTATACATAACCATGGATGTAGTGGG | |
| | AAACAATGTTGTTTGGTAAAAATAATGTACTTGATCAATGTAAAAAAGTATATAAAATAGTCTTACTAAA | |
| | AATCTAGGTTTTTTTTTCCTCCAAAAAAA | |
| DLG7 (actually, | GTTGGAAACGGCACTGCTGAGTGAGGTTGAGGGGTGTCTCGGTATGTGCGCCTTGGATCTGGTGTAGGCG | 160 |
| DLG1) | AGGTCACGCCTCTCTTCAGACAGCCCGAGCCTTCCCGGCCTGGCGCGTTTAGTTCGGAACTGCGGGACGC | |
| NM_001098424.1 | GCCGGTGGGCTAGGGCAAGGTGTGTGCCCTCTTCCTGATTCTGGAGAAAAATGCCGGTCCGGAAGCAAGA | |
| | TACCCAGAGAGCATTGCACCTTTTGGAGGAATATCGTTCAAAACTAAGCCAAACTGAAGACAGACAGCTC | |
| | AGAAGTTCCATAGAACGGGTTATTAACATATTTCAGAGCAACCTCTTTCAGGCTTTAATAGATATTCAAG | |
| | AATTTTATGAAGTGACCTTACTGGATAATCCAAAATGTATAGATCGTTCAAAGCCGTCTGAACCAATTCA | |
| | ACCTGTGAATACTTGGGAGATTTCCAGCCTTCCAAGCTCTACTGTGACTTCAGAGACACTGCCAAGCAGC | |
| | CTTAGCCCTAGTGTAGAGAAATACAGGTATCAGGATGAAGATACACCTCCTCAAGAGCATATTTCCCCAC | |
| | AAATCACAAATGAAGTGATAGGTCCAGAATTGGTTCATGTCTCAGAGAAGAACTTATCAGAGATTGAGAA | |
| | TGTCCATGGATTTGTTTCTCATTCTCATATTTCACCAATAAAGCCAACAGAAGCTGTTCTTCCCTCTCCT | |
| | CCCACTGTCCCTGTGATCCCTGTCCTGCCAGTCCCTGCTGAGAATACTGTCATCCTACCCACCATACCAC | |
| | AGGCAAATCCTCCCCCAGTACTGGTCAACACAGATAGCTTGGAAACACCAACTTACGTTAATGGCACAGA | |
| | TGCAGATTATGAATATGAAGAAATCACACTTGAAAGGGGAAATTCAGGGCTTGGTTTCAGCATTGCAGGA | |
| | GGTACGGACAACCCACACATTGGAGATGACTCAAGTATTTTCATTACCAAAATTATCACAGGGGGAGCAG | |
| | CCGCCCAAGATGGAAGATTGCGGGTCAATGACTGTATATTACGAGTAAATGAAGTAGATGTTCGTGATGT | |
| | AACACATAGCAAAGCAGTTGAAGCGTTGAAAGAAGCAGGGTCTATTGTACGCTTGTATGTAAAAAGAAGG | |
| | AAACCAGTGTCAGAAAAAATAATGGAAATAAAGCTCATTAAAGGTCCTAAAGGTCTTGGGTTTAGCATTG | |
| | CTGGAGGTGTTGGAAATCAGCATATTCCTGGGGATAATAGCATCTATGTAACCAAAATAATTGAAGGAGG | |
| | TGCAGCACATAAGGATGGCAAACTTCAGATTGGAGATAAACTTTTAGCAGTGAATAACGTATGTTTAGAA | |
| | GAAGTTACTCATGAAGAAGCAGTAACTGCCTTAAAGAACACATCTGATTTTGTTTATTTGAAAGTGGCAA | |
| | AACCCACAAGTATGTATATGAATGATGGCTATGCACCACCTGATATCACCAACTCTTCTTCTCAGCCTGT | |
| | TGATAACCATGTTAGCCCATCTTCCTTCTTGGGCCAGACACCAGCATCTCCAGCCAGATACTCCCCAGTT | |
| | TCTAAAGCAGTACTTGGAGATGATGAAATTACAAGGGAACCTAGAAAAGTTGTTCTTCATCGTGGCTCAA | |
| | CGGGCCTTGGTTTCAACATTGTAGGAGGAGAAGATGGAGAAGGAATATTTATTTCCTTTATCTTAGCCGG | |
| | AGGACCTGCTGATCTAAGTGGAGAGCTCAGAAAAGGAGATCGTATTATATCGGTAAACAGTGTTGACCTC | |
| | AGAGCTGCTAGTCATGAGCAGGCAGCAGCTGCATTGAAAAATGCTGGCCAGGCTGTCACAATTGTTGCAC | |
| | AATATCGACCTGAAGAATACAGTCGTTTTGAAGCTAAAATACATGATTTACGGGAGCAGATGATGAATAG | |
| | TAGTATTAGTTCAGGGTCAGGTTCTCTTCGAACTAGCCAGAAGCGATCCCTCTATGTCAGAGCCCTTTTT | |
| | GATTATGACAAGACTAAAGACAGTGGGCTTCCCAGTCAGGGACTGAACTTCAAATTTGGAGATATCCTCC | |
| | ATGTTATTAATGCTTCTGATGATGAATGGTGGCAAGCCAGGCAGGTTACACCAGATGGTGAGAGCGATGA | |
| | GGTCGGAGTGATTCCCAGTAAACGCAGAGTTGAGAAGAAAGAACGAGCCCGATTAAAAACAGTGAAATTC | |
| | AATTCTAAAACGAGAGATAAAGGGGAGATCCCTGACGACATGGGATCAAAAGGCCTGAAGCATGTAACTT | |
| | CTAATGCCAGCGATAGTGAAAGTAGTTACCGTGGTCAAGAAGAATACGTCTTATCTTATGAACCAGTGAA | |
| | TCAACAAGAAGTTAATTATACTCGACCAGTGATCATATTGGGACCTATGAAAGACAGGATAAATGATGAC | |
| | TTGATCTCAGAATTTCCTGACAAATTTGGATCCTGTGTTCCTCATACAACTAGACCAAAACGAGATTATG | |
| | AGGTAGATGGAAGAGATTATCATTTTGTGACTTCAAGAGAGCAGATGGAAAAAGATATCCAGGAACATAA | |
| | ATTCATTGAAGCTGGCCAGTATAACAATCATCTATATGGAACAAGTGTTCAGTCTGTACGAGAAGTAGCA | |
| | GAAAAGGGCAAACACTGTATCCTTGATGTGTCTGGAAATGCCATAAAGAGATTACAGATTGCACAGCTTT | |
| | ACCCTATCTCCATTTTTATTAAACCCAAATCCATGGAAAATATCATGGAAATGAATAAGCGTCTAACAGA | |
| | AGAACAAGCCAGAAAAACATTTGAGAGAGCCATGAAACTGGAACAGGAGTTTACTGAACATTTCACAGCT | |
| | ATTGTACAGGGGGATACGCTGGAAGACATTTACAACCAAGTGAAACAGATCATAGAAGAACAATCTGGTT | |
| | CTTACATCTGGGTTCCGGCAAAAGAAAAGCTATGAAAACTCATGTTTCTCTGTTTCTCTTTTCCACAATT | |
| | CCATTTTCTTTGGCATCTCTTTGCCCTTTCCTCTGGAGTCTTTCTTGAGTACTGATTTCATGTTGAATTG | |
| | TATCCCACACATCATGGTCTGCAGCTTCTTTTTCACATGTAGTGTCTCCTTCAAGTTACATCGTGTGTAT | |
| | TATTTAATGTCACTATTGGTTAGTGGCCATTTTTCAGAACTGAAGATGGAATGGCCTGACCAGCTATTAA | |
| | GAACGTGGGGAGACGCAGAAATTGTGGTAAAATTCCTTAATGTTTAAGGGAAAGTAACTTTAAGAGATTT | |
| | TTGGAAAAGCTTTATATACATTCTTTTCAAATTTCAGTACAAATGAAAAAGTGGTTTTAATCAGTGATTT | |
| | AGTAGACTTTGAGCAACTGTGCACGCTTCAGTTTAATAGCATGGTTTGGCCAGTGTATTACTCTCAAGTC | |
| | CTTTTCTCAATCAACTTCTATCATCAAAGCAATTGTTTCATTATAGATAAATAAGGACATTTTTTAATTT | |
| | AAAAATTCATGTCTGAGTTGACTTTCATAAGGGATTTCATTTTTTCCTCAACATTCTTAAAGCCTTTTAG | |
| | TATTTGACGGTTCTTTTTTCCCAGGACATTTGCTAGGAATAACAACGTTTCAATGTTTTTAATCTACTTG | |
| | AGCAACACTATCGTGTCTTACAAAAGTTGTTCATATGTAAATGATCATCACATTTCGTGAATTGAGGCCA | |
| | TGTTCAGGTGCTAAGGAAGTTCGCCTTTTACACAGAAGATTGAGAAAATTTCCTAGATATAAATACAGAT | |
| | AAATCAGACGTTACAGTGGTGACGTAGTAACCATCATGGCAATGGAAAGGAGTCCAATTCATAGCCTAAA | |
| | ACTTCAAATGTATTCTTAGGAGTCAGATTTTACTGAATATTTTACCCACAATAGCTGCCTATTTTGTTAT | |
| | AATAAAATATATATAAATATATATATAAAACTTTCTTTAAACTGTAACTATGGGAATTATTTTCTTTACA | |
| | TAGTTGCGCACACACACAAACATATATATATATTTAAAATATATTTTGTTTCTTTTGCCACCTACTCCTA | |
| | ACTTTTTGTTTGGTTTTTAAATTAAATATTAATTGAATAGACTTATCTTCCTTAATCATGTGAACTGAAA | |
| | ATGGGGGCATGGTGGTCATGAGGAGGAAACATTTAGGGAAATTAGATTATAAGTAAAAGTGTGGGCATAT | |
| | TCTCCTCTTTTCTACAAAGGTTTTCAAATGGTTCCTGAGGTTTTTTGTTGTTGTCCGTGTTGTTACTGTT | |
| | GTTCTTGTCATCAGGTTTGATTTTGGTCCTTGCCCTTTCCTTCTAGTTCTCCTTTTATTAATAGGAAGGC | |
| | AGGCAAAAGCCCCATTTATGTGTGTGTTTTCCCCTCAGACAGCTTTCATCCACTGCTCTGCACTAGAATT | |
| | GCACAAATCTTCATGGTGAGCAATTTTAAGAAATGTTAGTGAAAGGTAGAAATTATTTCACAAATCAGTT | |
| | TCTCTGGTCCTTCATATTAATAATAATATTTGGCTTCCCATTGCTCTTTGGAGTTGTTTATTAAATATGT | |
| | GTTTTTGACAACCTCCTCATTAGTTTCTTAAATGAGTACTGGTTTGTAAAGAATTATCAACATTATCCAT | |
| | TCCATTTATGAAGAAGAGGAGAACAGCTAATAAACTGTATTGTAAAATCCATATGTTAAGTGTGTCTTGA | |
| | ATTTTGAAAGAAAAAATATATTTTGCAAGCTAACATTTTCTTGAAACAATTTGAGGCATCATGTAACTTA | |
| | TAACCGAATCCAAGAGCCGTTAGGCAGCAGAGTGTGTTACCACATTGAAATACACAGTGCTGCTGTTAGA | |
| | CTAAATGTCGTAGGTTGTTAACCACATAGAAACACACTAGTATGAAGAAAACTGTTGTAAAATCTCAAGA | |
| | GCTTCAGAAACTGCCTTACAAGACCGCAGCATAAGCTATTTTGAAGTATTTACCAAATAGTCACATGTTG | |
| | TAAAATATCAAGTGGTTATAAAAGGATGCCATTTATATATTAAAATTTACATAACATTGTTTTCTGGA | |
| SLC40A1 | ATAAGAGCTGGGCCCGGCCCACGGCGGCGGCGGCGGCGGCGGAGAGAGCTGGCTCAGGGCGTCCGCTAGG | 161 |
| NM_014585.5 | CTCGGACGACCTGCTGAGCCTCCCAAACCGCTTCCATAAGGCTTTGCCTTTCCAACTTCAGCTACAGTGT | |
| | TAGCTAAGTTTGGAAAGAAGGAAAAAAGAAAATCCCTGGGCCCCTTTTCTTTTGTTCTTTGCCAAAGTCG | |
| | TCGTTGTAGTCTTTTTGCCCAAGGCTGTTGTGTTTTTAGAGGTGCTATCTCCAGTTCCTTGCACTCCTGT | |
| | TAACAAGCACCTCAGCGAGAGCAGCAGCAGCGATAGCAGCCGCAGAAGAGCCAGCGGGGTCGCCTAGTGT | |
| | CATGACCAGGGCGGGAGATCACAACCGCCAGAGAGGATGCTGTGGATCCTTGGCCGACTACCTGACCTCT | |
| | GCAAAATTCCTTCTCTACCTTGGTCATTCTCTCTCTACTTGGGGAGATCGGATGTGGCACTTTGCGGTGT | |
| | CTGTGTTTCTGGTAGAGCTCTATGGAAACAGCCTCCTTTTGACAGCAGTCTACGGGCTGGTGGTGGCAGG | |
| | GTCTGTTCTGGTCCTGGGAGCCATCATCGGTGACTGGGTGGACAAGAATGCTAGACTTAAAGTGGCCCAG | |
| | ACCTCGCTGGTGGTACAGAATGTTTCAGTCATCCTGTGTGGAATCATCCTGATGATGGTTTTCTTACATA | |
| | AACATGAGCTTCTGACCATGTACCATGGATGGGTTCTCACTTCCTGCTATATCCTGATCATCACTATTGC | |
| | AAATATTGCAAATTTGGCCAGTACTGCTACTGCAATCACAATCCAAAGGGATTGGATTGTTGTTGTTGCA | |
| | GGAGAAGACAGAAGCAAACTAGCAAATATGAATGCCACAATACGAAGGATTGACCAGTTAACCAACATCT | |
| | TAGCCCCCATGGCTGTTGGCCAGATTATGACATTTGGCTCCCCAGTCATCGGCTGTGGCTTTATTTCGGG | |
| | ATGGAACTTGGTATCCATGTGCGTGGAGTACGTTCTGCTCTGGAAGGTTTACCAGAAAACCCCAGCTCTA | |
| | GCTGTGAAAGCTGGTCTTAAAGAAGAGGAAACTGAATTGAAACAGCTGAATTTACACAAAGATACTGAGC | |
| | CAAAACCCCTGGAGGGAACTCATCTAATGGGTGTGAAAGACTCTAACATCCATGAGCTTGAACATGAGCA | |
| | AGAGCCTACTTGTGCCTCCCAGATGGCTGAGCCCTTCCGTACCTTCCGAGATGGATGGGTCTCCTACTAC | |
| | AACCAGCCTGTGTTTCTGGCTGGCATGGGTCTTGCTTTCCTTTATATGACTGTCCTGGGCTTTGACTGCA | |
| | TCACCACAGGGTACGCCTACACTCAGGGACTGAGTGGTTCCATCCTCAGTATTTTGATGGGAGCATCAGC | |
| | TATAACTGGAATAATGGGAACTGTAGCTTTTACTTGGCTACGTCGAAAATGTGGTTTGGTTCGGACAGGT | |
| | CTGATCTCAGGATTGGCACAGCTTTCCTGTTTGATCTTGTGTGTGATCTCTGTATTCATGCCTGGAAGCC | |
| | CCCTGGACTTGTCCGTTTCTCCTTTTGAAGATATCCGATCAAGGTTCATTCAAGGAGAGTCAATTACACC | |
| | TACCAAGATACCTGAAATTACAACTGAAATATACATGTCTAATGGGTCTAATTCTGCTAATATTGTCCCG | |
| | GAGACAAGTCCTGAATCTGTGCCCATAATCTCTGTCAGTCTGCTGTTTGCAGGCGTCATTGCTGCTAGAA | |
| | TCGGTCTTTGGTCCTTTGATTTAACTGTGACACAGTTGCTGCAAGAAAATGTAATTGAATCTGAAAGAGG | |
| | CATTATAAATGGTGTACAGAACTCCATGAACTATCTTCTTGATCTTCTGCATTTCATCATGGTCATCCTG | |
| | GCTCCAAATCCTGAAGCTTTTGGCTTGCTCGTATTGATTTCAGTCTCCTTTGTGGCAATGGGCCACATTA | |
| | TGTATTTCCGATTTGCCCAAAATACTCTGGGAAACAAGCTCTTTGCTTGCGGTCCTGATGCAAAAGAAGT | |
| | TAGGAAGGAAAATCAAGCAAATACATCTGTTGTTTGAGACAGTTTAACTGTTGCTATCCTGTTACTAGAT | |
| | TATATAGAGCACATGTGCTTATTTTGTACTGCAGAATTCCAATAAATGGCTGGGTGTTTTGCTCTGTTTT | |
| | TACCACAGCTGTGCCTTGAGAACTAAAAGCTGTTTAGGAAACCTAAGTCAGCAGAAATTAACTGATTAAT | |
| | TTCCCTTATGTTGAGGCATGGAAAAAAAATTGGAAAAGAAAAACTCAGTTTAAATACGGAGACTATAATG | |
| | ATAACACTGAATTCCCCTATTTCTCATGAGTAGATACAATCTTACGTAAAAGAGTGGTTAGTCACGTGAA | |
| | TTCAGTTATCATTTGACAGATTCTTATCTGTACTAGAATTCAGATATGTCAGTTTTCTGCAAAACTCACT | |
| | CTTGTTCAAGACTAGCTAATTTATTTTTTTGCATCTTAGTTATTTTTAAAAACAAATTCTTCAAGTATGA | |
| | AGACTAAATTTTGATAACTAATATTATCCTTATTGATCCTATTGATCTTAAGGTATTTACATGTATGTGG | |
| | AAAAACAAAACACTTAACTAGAATTCTCTAATAAGGTTTATGGTTTAGCTTAAAGAGCACCTTTGTATTT | |
| | TTATTATCAGATGGGGCAACATATTGTATGAAGCATATGTAGCACTTCACAGCATGGTTATCATGTAAGC | |
| | TGCAGGTAGAAGCAAAGCTGTAAAGTAGATTTATCACACAATGACTGCATACAGACTTCAAATATGTCAA | |
| | TAGTTTGGTCATAGAACCTAGAAGCCAAAAGCCACACAGAAGGGCAAGAATCCCAATTTAACTCATGTTA | |
| | TCATCATTAGTGATCTGTGTTGTAGAACATGAGGGTGTAAGCCTTCAGCCTGGCAAGTTACATGTAGAAA | |
| | GCCCACACTTGTGAAGGTTTTGTTTTACAAATCACTTGATTTAACACACTCAGGTAGAATATTTTTATTT | |
| | TTACTGTTTTATACCCAGAAGTTATTTCTACATTGTTCTACAGCAAGAATATTCATAAAAGTATCCCTTT | |
| | CAAATGCCTTTGAGAAGAATAGAAGAAAAAAAGTTTGTATATATTTTAAAAAATTGTTTTAAAAGTCAGT | |
| | TTGCAACATGTCTGTACCAAGATGGTACTTTGCCTTAACCGTTTATATGCACTTTCATGGAGACTGCAAT | |
| | ACGTTGCTATGAGCACTTTCTTTATCCTTGGAGTTTAATCCTTTGCTTCATCTTTCTACAGTATGACATA | |
| | ATGATTTGCTATGTTGTAAAATCTTTGTAAAAAATTTCTATATAAAAATATTTTGAAAATCTTAAAAAAA | |
| | AAAAAAAAAAAAAAAAAAAAA | |
| ORC6L | GCGCGCGGGTTTCGTTGACCCGCGGCGTTCACGGGAATTGTTCGCTTTAGTGCCGGCGCCATGGGGTCGG | 162 |
| NM_014321.3 | AGCTGATCGGGCGCCTAGCCCCGCGCCTGGGCCTCGCCGAGCCCGACATGCTGAGGAAAGCAGAGGAGTA | |
| | CTTGCGCCTGTCCCGGGTGAAGTGTGTCGGCCTCTCCGCACGCACCACGGAGACCAGCAGTGCAGTCATG | |
| | TGCCTGGACCTTGCAGCTTCCTGGATGAAGTGCCCCTTGGACAGGGCTTATTTAATTAAACTTTCTGGTT | |
| | TGAACAAGGAGACATATCAGAGCTGTCTTAAATCTTTTGAGTGTTTACTGGGCCTGAATTCAAATATTGG | |
| | AATAAGAGACCTAGCTGTACAGTTTAGCTGTATAGAAGCAGTGAACATGGCTTCAAAGATACTAAAAAGC | |
| | TATGAGTCCAGTCTTCCCCAGACACAGCAAGTGGATCTTGACTTATCCAGGCCACTTTTCACTTCTGCTG | |
| | CACTGCTTTCAGCATGCAAGATTCTAAAGCTGAAAGTGGATAAAAACAAAATGGTAGCCACATCCGGTGT | |
| | AAAAAAAGCTATATTTGATCGACTGTGTAAACAACTAGAGAAGATTGGACAGCAGGTCGACAGAGAACCT | |
| | GGAGATGTAGCTACTCCACCACGGAAGAGAAAGAAGATAGTGGTTGAAGCCCCAGCAAAGGAAATGGAGA | |
| | AGGTAGAGGAGATGCCACATAAACCACAGAAAGATGAAGATCTGACACAGGATTATGAAGAATGGAAAAG | |
| | AAAAATTTTGGAAAATGCTGCCAGTGCTCAAAAGGCTACAGCAGAGTGATTTCAGCTTCCAAACTGGTAT | |
| | ACATTCCAAACTGATAGTACATTGCCATCTCCAGGAAGACTTGACGGCTTTGGGATTTTGTTTAAACTTT | |
| | TATAATAAGGATCCTAAGACTGTTGCCTTTAAATAGCAAAGCAGCCTACCTGGAGGCTAAGTCTGGGCAG | |
| | TGGGCTGGCCCCTGGTGTGAGCATTAGACCAGCCACAGTGCCTGATTGGTATAGCCTTATGTGCTTTCCT | |
| | ACAAAATGGAATTGGAGGCCGGGCGCAGTGGCTCACGCCTGTAATCCCAGCACTTTGGGAGGCCAAGGTG | |
| | GGTGGATCACCTGAGGTCAGGAGCTCGAGACCAGCCTGGCCAACATGGTGAAACCCCATCTCTACTAAAA | |
| | ATACAAAAATTAGCCAGGTGTGATGGTGCATGCCTGTAATCCCAGCTCCTCAGTAGGCTGAGACAGGAGC | |
| | ATCACTTGAACGTGGGAGGCAGAGGTTGCAGTGAGCCGAGATTGCACCACCGCACTCCAGCCTGGGTGAC | |
| | AGAGCGAGACTTATCTCATAAATAAATAGATAGATACTCCAGCCTGGGTGACAGAGCGAGACTTATAGAT | |
| | AGATAGATAGATAGATGGATAGATAGATAGATAGATAGATAGATAGATAAACGGAATTGGAGCCATTTTG | |
| | CTTTAAGTGAATGGCAGTCCCTTGTCTTATTCAGAATATAAAATTCAGTCTGAATGGCATCTTACAGATT | |
| | TTACTTCAATTTTTGTGTACGGTATTTTTTATTTGACTAAATCAATATATTGTACAGCCTAAGTTAATAA | |
| | ATGTTATTTATATATGCAAAAAAAAAAAAAAAAA | |
| BCMP11 | AGAAACATCCAGAATACATTTCCAACAAGAGCACTGGCCAAGTCAGCTTCTTCTGAGAGAGTCTCTAGAA | 163 |
| NM_176813.3 | GACATGATGCTACACTCAGCTTTGGGTCTCTGCCTCTTACTCGTCACAGTTTCTTCCAACCTTGCCATTG | |
| | CAATAAAAAAGGAAAAGAGGCCTCCTCAGACACTCTCAAGAGGATGGGGAGATGACATCACTTGGGTACA | |
| | AACTTATGAAGAAGGTCTCTTTTATGCTCAAAAAAGTAAGAAGCCATTAATGGTTATTCATCACCTGGAG | |
| | GATTGTCAATACTCTCAAGCACTAAAGAAAGTATTTGCCCAAAATGAAGAAATACAAGAAATGGCTCAGA | |
| | ATAAGTTCATCATGCTAAACCTTATGCATGAAACCACTGATAAGAATTTATCACCTGATGGGCAATATGT | |
| | GCCTAGAATCATGTTTGTAGACCCTTCTTTAACAGTTAGAGCTGACATAGCTGGAAGATACTCTAACAGA | |
| | TTGTACACATATGAGCCTCGGGATTTACCCCTATTGATAGAAAACATGAAGAAAGCATTAAGACTTATTC | |
| | AGTCAGAGCTATAAGAGATGATAGAAAAAAGCCTTCACTTCAAAGAAGTCAAATTTCATGAAGAAAACCT | |
| | CTGGCACATTGACAAATACTAAATGTGCAAGTATATAGATTTTGTAATATTACTATTTAGTTTTTTTAAT | |
| | GTGTTTGCAATAGTCTTATTAAAATAAATGTTTTTTAAATCTGAGACTGAAAAAAAAAAAAAA | |
| EXO1 | TGCACATGCGATCTCTGAGATATGTACACAGTCATTCTTACTATCGCACTCAGCCATTCTTACTACGCTA | 164 |
| AF084974.1 | AAGAAGAAATAATTATTCGAGGATATTTGCCTGGCCCAGAAGAAACTTATGTAAATTTCATGAACTATTA | |
| | TATCCGTTTTCCTCGGAGTGAGAGAAAACTCTTTTTAGATATCATCTGAGAGGTAGTTAATTTGGCACCA | |
| | TGGGGATACAGGGATTGCTACAATTTATCAAAGAAGCTTCAGAACCCATCCATGTGAGGAAGTATAAAGG | |
| | GCAGGTAGTAGCTGTGGATACATATTGCTGGCTTCACAAAGGAGCTATTGCTTGTGCTGAAAAACTAGCC | |
| | AAAGGTGAACCTACTGATAGGTATGTAGGATTTTGTATGAAATTTGTAAATATGTTACTATCTCATGGGA | |
| | TCAAGCCTATTCTCGTATTTGATGGATGTACTTTACCTTCTAAAAAGGAAGTAGAGAGATCTAGAAGAGA | |
| | AAGACGACAAGCCAATCTTCTTAAGGGAAAGCAACTTCTTCGTGAGGGGAAAGTCTCGGAAGCTCGAGAG | |
| | TGTTTCACCCGGTCTATCAATATCACACATGCCATGGCCCACAAAGTAATTAAAGCTGCCCGGTCTCAGG | |
| | GGGTAGATTGCCTCGTGGCTCCCTATGAAGCTGATGCGCAGTTGGCCTATCTTAACAAAGCGGGAATTGT | |
| | GCAAGCCATAATTACAGAGGACTCGGATCTCCTAGCTTTTGGCTGTAAAAAGGTAATTTTAAAGATGGAC | |
| | CAGTTTGGAAATGGACTTGAAATTGATCAAGCTCGGCTAGGAATGTGCAGACAGCTTGGGGATGTATTCA | |
| | CGGAAGAGAAGTTTCGTTACATGTGTATTCTTTCAGGTTGTGACTACCTGTCATCACTGCGTGGGATTGG | |
| | ATTAGCAAAGGCATGCAAAGTCCTAAGACTAGCCAATAATCCAGATATAGTAAAGGTTATCAAGAAAATT | |
| | GGACATTATCTCAAGATGAATATCACGGTACCAGAGGATTACATCAACGGGTTTATTCGGGCCAACAATA | |
| | CCTTCCTCTATCAGCTAGTTTTTGATCCCATCAAAAGGAAACTTATTCCTCTGAACGCCTATGAAGATGA | |
| | TGTTGATCCTGAAACACTAAGCTACGCTGGGCAATATGTTGATGATTCCATAGCTCTTCAAATAGCACTT | |
| | GGAAATAAAGATATAAATACTTTTGAACAGATCGATGACTACAATCCAGACACTGCTATGCCTGCCCATT | |
| | CAAGAAGTCGTAGTTGGGATGACAAAACATGTCAAAAGTCAGCTAATGTTAGCAGCATTTGGCATAGGAA | |
| | TTACTCTCCCAGACCAGAGTCGGGTACTGTTTCAGATGCCCCACAATTGAAGGAAAATCCAAGTACTGTG | |
| | GGAGTGGAACGAGTGATTAGTACTAAAGGGTTAAATCTCCCAAGGAAATCATCCATTGTGAAAAGACCAA | |
| | GAAGTGCAGAGCTGTCAGAAGATGACCTGTTGAGTCAGTATTCTCTTTCATTTACGAAGAAGACCAAGAA | |
| | AAATAGCTCTGAAGGCAATAAATCATTGAGCTTTTCTGAAGTGTTTGTGCCTGACCTGGTAAATGGACCT | |
| | ACTAACAAAAAGAGTGTAAGCACTCCACCTAGGACGAGAAATAAATTTGCAACATTTTTACAAAGGAAAA | |
| | ATGAAGAAAGTGGTGCAGTTGTGGTTCCAGGGACCAGAAGCAGGTTTTTTTGCAGTTCAGATTCTACTGA | |
| | CTGTGTATCAAACAAAGTGAGCATCCAGCCTCTGGATGAAACTGCTGTCACAGATAAAGAGAACAATCTG | |
| | CATGAATCAGAGTATGGAGACCAAGAAGGCAAGAGACTGGTTGACACAGATGTAGCACGTAATTCAAGTG | |
| | ATGACATTCCGAATAATCATATTCCAGGTGATCATATTCCAGACAAGGCAACAGTGTTTACAGATGAAGA | |
| | GTCCTACTCTTTTAAGAGCAGCAAATTTACAAGGACCATTTCACCACCCACTTTGGGAACACTAAGAAGT | |
| | TGTTTTAGTTGGTCTGGAGGTCTTGGAGATTTTTCAAGAACGCCGAGCCCCTCTCCAAGCACAGCATTGC | |
| | AGCAGTTCCGAAGAAAGAGCGATTCCCCCACCTCTTTGCCTGAGAATAATATGTCTGATGTGTCGCAGTT | |
| | AAAGAGCGAGGAGTCCAGTGACGATGAGTCTCATCCCTTACGAGAAGGGGCATGTTCTTCACAGTCCCAG | |
| | GAAAGTGGAGAATTCTCACTGCAGAGTTCAAATGCATCAAAGCTTTCTCAGTGCTCTAGTAAGGACTCTG | |
| | ATTCAGAGGAATCTGATTGCAATATTAAGTTACTTGACAGTCAAAGTGACCAGACCTCCAAGCTATGTTT | |
| | ATCTCATTTCTCAAAAAAAGACACACCTCTAAGGAACAAGGTTCCTGGGCTATATAAGTCCAGTTCTGCA | |
| | GACTCTCTTTCTACAACCAAGATCAAACTTCTAGGACCTGCCAGAGCCAGTGGGCTGAGCAAGAAGCCGG | |
| | CAAGCATCCAGAAGAGAAAGCATCATAATGCCGAGAACAAGCCGGGGTTACAGATCAAACTCAATGAGCT | |
| | CTGGAAAAACTTTGGATTTAAAAAAGATTCTGAAAAGCTTCCTCCTTGTAAGAAACCCCTGTCCCCAGTC | |
| | AGAGATAACATCCAACTAACTCCAGAAGCGGAAGAGGATATATTTAACAAACCTGAATGTGGCCGTGTTC | |
| | AAAGAGCAATATTCCAGTAAATGCAGACTGCTGCAAAGCTTTTGCCTGCAAGAGAATCTGATCAATTTGA | |
| | AGTCCCTGTTTGGGAATGAGGCACTTATCAGCATGAAGAATTTTTTCTCATTCTGTGCCATTTTAAAAAT | |
| | AGAATACATTTGTATATTAACTTTAAAAAAAAAAAAAAAAAA | |
| KIF20A | TTTTTCCCCTTAAGACAAAGCAAGCACCCTAAACCAGTTACCCTGTGCACTCCTGTTAAGATTGTTGCTA | 165 |
| NM_005733.2 | AGGAAGGACAGGAGTTGGCTGCTGAAGCCTCAAGATTTCCTTTAGGCTCTTAGGTAAGAAATGTCTAAGG | |
| | TTCAAGGAAAAAGGTTAAGTTGGAAGAATCCCAGGCAAAATAAGTGCGAATCCACGACAGTTGGTAACCC | |
| | GGACCCACATTAGAACTCAGAGGTCAAGCAGAAGCGAACGACTGGAATTCCAGTCAGGCCCGCCCCCTTT | |
| | CCTTACGCGGATTGGTAGCTGCAGGCTTCCCTATCTGATTGGCCGAACGAACGCAGCGCGTAATTTAAAA | |
| | TATTGTATCTGTAACAAAGCTGCACCTCGTGGGCGGAGTTGTGCTCTGCGGCTGCGAAAGTCCAGCTTCG | |
| | GCGACTAGGTGTGAGTAAGCCAGTATCCCAGGAGGAGCAAGTGGCACGTCTTCGGACCTAGGCTGCCCCT | |
| | GCCGTCATGTCGCAAGGGATCCTTTCTCCGCCAGCGGGCTTGCTGTCCGATGACGATGTCGTAGTTTCTC | |
| | CCATGTTTGAGTCCACAGCTGCAGATTTGGGGTCTGTGGTACGCAAGAACCTGCTATCAGACTGCTCTGT | |
| | CGTCTCTACCTCCCTAGAGGACAAGCAGCAGGTTCCATCTGAGGACAGTATGGAGAAGGTGAAAGTATAC | |
| | TTGAGGGTTAGGCCCTTGTTACCTTCAGAGTTGGAACGACAGGAAGATCAGGGTTGTGTCCGTATTGAGA | |
| | ATGTGGAGACCCTTGTTCTACAAGCACCCAAGGACTCTTTTGCCCTGAAGAGCAATGAACGGGGAATTGG | |
| | CCAAGCCACACACAGGTTCACCTTTTCCCAGATCTTTGGGCCAGAAGTGGGACAGGCATCCTTCTTCAAC | |
| | CTAACTGTGAAGGAGATGGTAAAGGATGTACTCAAAGGGCAGAACTGGCTCATCTATACATATGGAGTCA | |
| | CTAACTCAGGGAAAACCCACACGATTCAAGGTACCATCAAGGATGGAGGGATTCTCCCCCGGTCCCTGGC | |
| | GCTGATCTTCAATAGCCTCCAAGGCCAACTTCATCCAACACCTGATCTGAAGCCCTTGCTCTCCAATGAG | |
| | GTAATCTGGCTAGACAGCAAGCAGATCCGACAGGAGGAAATGAAGAAGCTGTCCCTGCTAAATGGAGGCC | |
| | TCCAAGAGGAGGAGCTGTCCACTTCCTTGAAGAGGAGTGTCTACATCGAAAGTCGGATAGGTACCAGCAC | |
| | CAGCTTCGACAGTGGCATTGCTGGGCTCTCTTCTATCAGTCAGTGTACCAGCAGTAGCCAGCTGGATGAA | |
| | ACAAGTCATCGATGGGCACAGCCAGACACTGCCCCACTACCTGTCCCGGCAAACATTCGCTTCTCCATCT | |
| | GGATCTCATTCTTTGAGATCTACAACGAACTGCTTTATGACCTATTAGAACCGCCTAGCCAACAGCGCAA | |
| | GAGGCAGACTTTGCGGCTATGCGAGGATCAAAATGGCAATCCCTATGTGAAAGATCTCAACTGGATTCAT | |
| | GTGCAAGATGCTGAGGAGGCCTGGAAGCTCCTAAAAGTGGGTCGTAAGAACCAGAGCTTTGCCAGCACCC | |
| | ACCTCAACCAGAACTCCAGCCGCAGTCACAGCATCTTCTCAATCAGGATCCTACACCTTCAGGGGGAAGG | |
| | AGATATAGTCCCCAAGATCAGCGAGCTGTCACTCTGTGATCTGGCTGGCTCAGAGCGCTGCAAAGATCAG | |
| | AAGAGTGGTGAACGGTTGAAGGAAGCAGGAAACATTAACACCTCTCTACACACCCTGGGCCGCTGTATTG | |
| | CTGCCCTTCGTCAAAACCAGCAGAACCGGTCAAAGCAGAACCTGGTTCCCTTCCGTGACAGCAAGTTGAC | |
| | TCGAGTGTTCCAAGGTTTCTTCACAGGCCGAGGCCGTTCCTGCATGATTGTCAATGTGAATCCCTGTGCA | |
| | TCTACCTATGATGAAACTCTTCATGTGGCCAAGTTCTCAGCCATTGCTAGCCAGCTTGTGCATGCCCCAC | |
| | CTATGCAACTGGGATTCCCATCCCTGCACTCGTTCATCAAGGAACATAGTCTTCAGGTATCCCCCAGCTT | |
| | AGAGAAAGGGGCTAAGGCAGACACAGGCCTTGATGATGATATTGAAAATGAAGCTGACATCTCCATGTAT | |
| | GGCAAAGAGGAGCTCCTACAAGTTGTGGAAGCCATGAAGACACTGCTTTTGAAGGAACGACAGGAAAAGC | |
| | TACAGCTGGAGATGCATCTCCGAGATGAAATTTGCAATGAGATGGTAGAACAGATGCAACAGCGGGAACA | |
| | GTGGTGCAGTGAACATTTGGACACCCAAAAGGAACTATTGGAGGAAATGTATGAAGAAAAACTAAATATC | |
| | CTCAAGGAGTCACTGACAAGTTTTTACCAAGAAGAGATTCAGGAGCGGGATGAAAAGATTGAAGAGCTAG | |
| | AAGCTCTCTTGCAGGAAGCCAGACAACAGTCAGTGGCCCATCAGCAATCAGGGTCTGAATTGGCCCTACG | |
| | GCGGTCACAAAGGTTGGCAGCTTCTGCCTCCACCCAGCAGCTTCAGGAGGTTAAAGCTAAATTACAGCAG | |
| | TGCAAAGCAGAGCTAAACTCTACCACTGAAGAGTTGCATAAGTATCAGAAAATGTTAGAACCACCACCCT | |
| | CAGCCAAGCCCTTCACCATTGATGTGGACAAGAAGTTAGAAGAGGGCCAGAAGAATATAAGGCTGTTGCG | |
| | GACAGAGCTTCAGAAACTTGGTGAGTCTCTCCAATCAGCAGAGAGAGCTTGTTGCCACAGCACTGGGGCA | |
| | GGAAAACTTCGTCAAGCCTTGACCACTTGTGATGACATCTTAATCAAACAGGACCAGACTCTGGCTGAAC | |
| | TGCAGAACAACATGGTGCTAGTGAAACTGGACCTTCGGAAGAAGGCAGCATGTATTGCTGAGCAGTATCA | |
| | TACTGTGTTGAAACTCCAAGGCCAGGTTTCTGCCAAAAAGCGCCTTGGTACCAACCAGGAAAATCAGCAA | |
| | CCAAACCAACAACCACCAGGGAAGAAACCATTCCTTCGAAATTTACTTCCCCGAACACCAACCTGCCAAA | |
| | GCTCAACAGACTGCAGCCCTTATGCCCGGATCCTACGCTCACGGCGTTCCCCTTTACTCAAATCTGGGCC | |
| | TTTTGGCAAAAAGTACTAAGGCTGTGGGGAAAGAGAAGAGCAGTCATGGCCCTGAGGTGGGTCAGCTACT | |
| | CTCCTGAAGAAATAGGTCTCTTTTATGCTTTACCATATATCAGGAATTATATCCAGGATGCAATACTCAG | |
| | ACACTAGCTTTTTTCTCACTTTTGTATTATAACCACCTATGTAATCTCATGTTGTTGTTTTTTTTTATTT | |
| | ACTTATATGATTTCTATGCACACAAAAACAGTTATATTAAAGATATTATTGTTCACATTTTTTATTGAAT | |
| | TCCAAATGTAGCAAAATCATTAAAACAAATTATAAAAGGGA | |
| EPN3 | CTGTTACTGCTGAGGCAGACCTGCCGGGCCAGCTGAGCAACTTTCCTCGGAGTGCTGCCTGGCGCTGGCT | 166 |
| NM_017957.2 | AGGAGGCAAACGCACGCGGGAAGAGCTGCTACCCATTCCAGGGACCCTGCCGCTGCCCCTCTGAGGGGTC | |
| | TGCACCTCCTGGGAGCAGGTGGGTCTCTGGGACGAGGGTCCATGGTGGATGGCTCTGGAGACGCTCCCGA | |
| | GGCTGTGCCGTCCCGCTGCTGCACAGGTCGGAGGGTCACCGCAGAGGCTACTCGGGCTGGGGCTGGGGCC | |
| | GAGGGAGCCCGCACTGGAGCCCCATGTGGAACCCAAGGATGCAGCTGCTCTGCTAACACGGCAGCCCATC | |
| | CTTCAAGACTGTGACCTCGCCACAGTGGCCCTCAGCCCTCCACCTCCGGCGGGGGCGAGGGCCACCCACC | |
| | TCCAAGTCTCCAGCCATGACGACCTCCGCACTCCGGCGCCAGGTGAAGAACATCGTGCACAACTACTCCG | |
| | AGGCAGAAATCAAGGTGCGCGAGGCCACCAGCAATGACCCCTGGGGCCCCCCTAGTTCGCTCATGTCCGA | |
| | GATCGCTGACCTGACCTTCAACACAGTGGCCTTCACCGAAGTCATGGGCATGCTGTGGCGGCGGCTCAAT | |
| | GACAGCGGCAAGAACTGGCGGCACGTGTACAAGGCTCTAACATTGCTGGACTACCTGCTCAAGACGGGCT | |
| | CCGAGCGGGTGGCCCACCAGTGCCGCGAGAACCTCTACACCATCCAGACACTCAAGGACTTCCAGTACAT | |
| | CGACCGCGACGGCAAGGACCAGGGCGTCAACGTGCGCGAGAAGGTCAAGCAGGTGATGGCCCTGCTCAAG | |
| | GATGAGGAGCGGCTGCGGCAGGAGCGAACCCACGCCCTCAAGACCAAGGAGCGCATGGCACTGGAGGGCA | |
| | TCGGCATTGGCAGTGGGCAGCTGGGCTTCAGCCGCCGCTACGGCGAGGACTACAGCCGCTCCCGGGGCTC | |
| | CCCGTCCTCCTACAACTCCTCCTCTTCGTCACCCCGCTATACCTCCGACCTGGAGCAGGCCCGGCCTCAG | |
| | ACGTCAGGGGAAGAGGAACTGCAGCTGCAGCTGGCCCTCGCCATGAGCCGTGAGGAGGCAGAGAAGCCTG | |
| | TCCCCCCAGCCTCCCACAGGGACGAGGACCTGCAGCTGCAGCTGGCTCTGCGCCTGAGCCGGCAGGAGCA | |
| | CGAGAAGGAGGTGAGGTCCTGGCAGGGTGATGGCTCCCCCATGGCCAATGGTGCAGGGGCCGTGGTCCAC | |
| | CATCAGCGGGACAGAGAGCCTGAGAGAGAAGAGAGAAAGGAGGAGGAGAAGCTAAAAACCAGCCAGTCCT | |
| | CCATCCTGGACTTGGCTGACATCTTCGTACCTGCCCTGGCCCCGCCCTCCACACACTGCTCTGCTGACCC | |
| | ATGGGACATCCCAGGTTTTAGGCCGAACACAGAGGCCAGTGGATCCTCCTGGGGGCCTTCTGCAGACCCC | |
| | TGGTCTCCGATCCCCTCAGGAACCGTCCTGTCCCGAAGCCAGCCCTGGGATCTGACTCCCATGCTCTCCT | |
| | CCTCTGAGCCCTGGGGCAGGACCCCAGTGCTGCCTGCTGGGCCCCCCACCACAGACCCCTGGGCCCTGAA | |
| | CTCTCCCCACCACAAACTCCCCAGCACTGGGGCTGACCCTTGGGGAGCCTCCCTGGAGACCTCCGACACA | |
| | CCTGGTGGTGCCTCGACCTTTGACCCATTTGCCAAACCTCCAGAATCCACAGAGACCAAGGAGGGGCTGG | |
| | AGCAGGCCCTGCCCTCTGGGAAGCCCAGCAGCCCTGTGGAGCTGGACCTGTTTGGAGACCCCAGCCCCAG | |
| | TTCCAAGCAAAATGGCACGAAGGAGCCAGATGCCCTGGACCTGGGCATACTAGGGGAAGCACTAACCCAG | |
| | CCAAGCAAAGAGGCCCGAGCTTGCCGGACTCCCGAGTCCTTCCTGGGTCCCTCAGCTTCCTCCTTGGTCA | |
| | ACCTTGACTCGTTGGTCAAGGCACCCCAGGTTGCAAAGACCCGGAACCCCTTCCTGACAGGTCTCAGCGC | |
| | TCCGTCCCCCACCAACCCGTTCGGCGCGGGCGAGCCGGGCAGGCCGACGCTAAACCAGATGCGCACCGGC | |
| | TCGCCGGCGCTGGGCCTGGCAGGCGGGCCTGTGGGGGCGCCCCTGGGCTCCATGACCTACAGCGCCTCTC | |
| | TGCCCCTCCCGCTCAGCAGCGTGCCAGCTGGCTTGACCCTCCCCGCCTCGGTTAGCGTCTTCCCGCAGGC | |
| | CGGAGCCTTCGCACCGCAGCCGCTGCTGCCCACGCCGAGCTCAGCCGGGCCGCGGCCCCCGCCCCCGCAG | |
| | ACCGGCACCAACCCCTTCCTCTGAGCCCCGCCCCGTCCCATACCGGCCTGCGCCTGCGCCGGACGCTCCG | |
| | CGGCCCCGCCTCCGGACCCGGGGCTGGGCGGGGCGCCGGTGCTAGTGGAACGCCGAGCCAGTGGCGGCTG | |
| | GTATCCCGCGGCGGCTCTGGAAGCTGGACGCGGACCACGGCCCGGGAGCTAGAAACTGAACGCCCGCATA | |
| | ATAAAGACTGGAACCCTCGTTCTCAGCTCTCACCAAGTGGACTTTTTGCGGGGTGTGGCGGCCGGGTCTC | |
| | GACCACAGCGTGGATCACCGGCTGTTTAGGAAACTGCAGCTGCACAACGTGGGGTGCAAAACTGCCCCGC | |
| | TTCCTTTACAGCTCTTCTCAACCCTCACCTCCATCCCCCGTCACCCAGGCACCTTCGCTTCCAGATGCTG | |
| | CCAGGCTGTCACTCAATTCGGTCATTTCATTCATTTATCACACATGGGCACTGGGGTTGGGCTAACAGCA | |
| | AGAGACAATAGGCCTTTGTTCCTATTTATTGGGTACTGCTTACGTGCTAAGCAGATCAGTTTATTTAATG | |
| | CTTGCAACGACTCTCTGAGGTAGAAAATATTGTTAATTCCGTTCAGGATCCCGGCTACATAATCTGTGGG | |
| | GCTCAATACAAAATAAAAATGTAGGGGCTCCTTGTTCAAAATCGTATGAAGAATTTCAAAACAGGGACAA | |
| | CAGAGCATGAAACCAAGCGCAAAGCCCACTGCAGTGCGATTGCACAGGTATCTCACCTTGCAGCCGGCAC | |
| | TACTCCCATTTTTCAGGCAAGGAAACCGTGGCTCAGAGAGGTTGAATGGCATGCTCAAAGTCACAAAGCT | |
| | GGCATGGGGCGGGGCTGGAACTCAAGAGTCAGACAGTCTGGCTCCAAGGCCTGGAGATCCCAGGCTGGGC | |
| | CCCAGATTTAATTCAGCAAATATTGACTGACTGCTGTGGACAAAGTGCTGGGCTCACCTTGGAGGGATCC | |
| | AACCTCCAGGAGCTCGAGCGCAGCAGGGTAGACAAGCCAGGGGCACGTGATGCGGCTGTGGCAGAAGCCA | |
| | AGTGCAGGAGCTCCCAGGCTCCTTTGTTTTACTGAGTCACCTTAAATGTAACTCTGCCCTCTCCCTTGCT | |
| | TCGCCAAGGCTAGCGAGAAACTCAGTCTTAGCCACACAGGAGGAATCGGACCCCTTCTGGGGGTTTATGT | |
| | GGAGTCTGGGAAACCAAGGGTGGGGTGAGGCCTGGTACTCAATCCAGGAGGGGCCCCTATGACCACCCTC | |
| | GCCTGTTTTTCTTCTCAATGCTCCCTGATCACTGGACCACTGGACACTGATGTGTCCTCAGTGCTTGGGG | |
| | TCTGGCTCTGCAGGCAGCCTGCAGCCAGCCTCCATCCCCCTTTCAGGGACAAATGGCCTTCCACCAGAGT | |
| | CGGTGAGTGGAGAGGCACAATGCCACTCCCCTTCCTGAGGTGGGGGTAGGGGAAGGGAGTCCCACAATGC | |
| | AGTTACAAACAGGATGGACAAGAACACCTGCTCAGGAGTCAGACTTACAGGGTTCAAAGTTCTGCTCCAA | |
| | GGTTTGACCCTAACAAGAATCACTTAGTAATAAGTGGTTATGCTCTGTGACCTTGAGTAAATTACTTACC | |
| | CTCTCCAAAAAAAAAAAAAAAAAA | |
| PTTG1 | GCGGCCTCAGATGAATGCGGCTGTTAAGACCTGCAATAATCCAGAATGGCTACTCTGATCTATGTTGATA | 167 |
| NM_004219.2 | AGGAAAATGGAGAACCAGGCACCCGTGTGGTTGCTAAGGATGGGCTGAAGCTGGGGTCTGGACCTTCAAT | |
| | CAAAGCCTTAGATGGGAGATCTCAAGTTTCAACACCACGTTTTGGCAAAACGTTCGATGCCCCACCAGCC | |
| | TTACCTAAAGCTACTAGAAAGGCTTTGGGAACTGTCAACAGAGCTACAGAAAAGTCTGTAAAGACCAAGG | |
| | GACCCCTCAAACAAAAACAGCCAAGCTTTTCTGCCAAAAAGATGACTGAGAAGACTGTTAAAGCAAAAAG | |
| | CTCTGTTCCTGCCTCAGATGATGCCTATCCAGAAATAGAAAAATTCTTTCCCTTCAATCCTCTAGACTTT | |
| | GAGAGTTTTGACCTGCCTGAAGAGCACCAGATTGCGCACCTCCCCTTGAGTGGAGTGCCTCTCATGATCC | |
| | TTGACGAGGAGAGAGAGCTTGAAAAGCTGTTTCAGCTGGGCCCCCCTTCACCTGTGAAGATGCCCTCTCC | |
| | ACCATGGGAATCCAATCTGTTGCAGTCTCCTTCAAGCATTCTGTCGACCCTGGATGTTGAATTGCCACCT | |
| | GTTTGCTGTGACATAGATATTTAAATTTCTTAGTGCTTCAGAGTTTGTGTGTATTTGTATTAATAAAGCA | |
| | TTCTTCAACAGAAAAAAAAAAAAAAAAA | |
| RERG | ACTGCAGCATCCTGGCCGCTGAGCGCAGCGGCCTTGGCCGGGCTCAGCTCGCGTCCTGCCGCAGTCCCTC | 168 |
| NM_032918.2 | CGCCGCTAGTCGGAGCGAGCGCGAGTGAGGAGACCCCCGCCGGGCCACTGGCACTTGCTTCTGCGGCGAG | |
| | TCCCACCCACGACCGCAGCCCAGCAACTCGCAAACGCAACCTGAAGCCTGGGCTGCGCAGTGTGGGAGGG | |
| | CTTCGCGATCTTGGGGGACCCATTCCGAACTTGCAGAGGACCGTAGCTCTCCTGGCCTGGAGAGTGTGAA | |
| | CAGGATTGTGGACTCTTCCAAGATTCACAATGATATGGTGAATCCAAAGACTGGAACCAAAAAGATTTAC | |
| | TCAGTGCTTTAGTTTTAACAACAGTAAATTGTCTACCAACACCCATCATGGCTAAAAGTGCGGAGGTCAA | |
| | ACTGGCAATATTTGGGAGAGCAGGCGTGGGCAAGTCAGCTCTTGTAGTGAGATTTCTGACCAAACGGTTC | |
| | ATCTGGGAATATGATCCCACCCTCGAATCAACCTACCGACACCAAGCAACCATCGATGATGAAGTTGTTT | |
| | CCATGGAGATACTAGACACTGCTGGTCAGGAAGATACCATTCAGAGGGAGGGGCACATGCGATGGGGGGA | |
| | AGGCTTTGTGCTGGTCTACGACATTACTGACCGAGGAAGTTTTGAGGAAGTGCTGCCACTTAAGAACATC | |
| | CTAGATGAGATCAAAAAGCCCAAGAATGTGACTCTCATCTTGGTTGGAAACAAAGCTGACTTGGACCACT | |
| | CCAGGCAGGTTAGCACAGAAGAAGGAGAGAAGCTGGCCACAGAATTGGCTTGTGCTTTTTACGAGTGCTC | |
| | TGCCTGCACTGGAGAAGGGAACATCACAGAGATATTCTATGAATTGTGTCGAGAGGTGCGTCGCCGGAGG | |
| | ATGGTGCAGGGCAAGACGAGGCGACGCAGCTCCACCACGCATGTCAAGCAAGCCATTAACAAGATGCTCA | |
| | CCAAAATCAGTAGTTAGGCAGCCCAGCTGAGGTGGACCAACTAATTGGAAACACTCTTCCCCTTCTGTTC | |
| | CCCTTTCAAAAATAAAACAAAATATTGCATTCTTTGTTTGGATTCTGAGAAATGTCTGGGCTTCCCATTG | |
| | TTTCTGGCCTCTAATAGGTTGGGAAGTTTTAGCGTGTTTTATGCAATTTCAGTGCTAACAATTTCTTCCT | |
| | TTCCTGCTTGAATAAGATACACTCTAATGGCATTTGAACATGTAATCACCAGAGATTCTGAAATGACTGG | |
| | TTTATGTTAAGCTATTTTTAGGCATCTTCACCTTGCTTTAAGTAGGTTGAAGTTTTTGCAAAGGCATTTA | |
| | AAAATTCAATTTCTTGTCAGATACTACAAATAATTTTCTTAAAAGTCTAAGATAGCAGAAAATACAGTAA | |
| | AAACACAGGAGAAGAAGCTGAGCTATTGGAACAGGAAATAGAAGGAACTCTAGTTTCTGTTTGAAGTGAG | |
| | GATTTTCTGAATTATCTAATATCATCTAGGTTTTCTTTAAAATTTTATTTTGTTCTTCAGTTCAAGCATC | |
| | TTCTCACTAATGTTTTTCACTATAACAGAGAATTCATTTCAATTTGAGTTGGTTCTCTCAATGATCTATT | |
| | GATCATTACACCCTAACTCTCCTTCCTTGGCTCAAACAATATTTTCCCTATAACAAAGGCAATAGGACAC | |
| | AAAATTCACATCCTGCTGGGCCTTTTTTCATCAAGTCAGGGTGATATAAAAACATTGGAAGTCTTTTCAC | |
| | CAAACCCTGACTTTATTGAATGCTAGTAGAAGATGTAGAATTAGAGACATCTGATTTGTTTATCACCTTA | |
| | GCAGAAAAACCACAGTCCAAAAGACAAGCAAATTAAGAATGGAGCTTAACCATGCCTCCATTGGGAAGTC | |
| | TAGACTTTGAGCCAGGTACAGTAAGAAAAATTAGCCTCTGATTCATTAAGTTTGCCACATGACTTATTTT | |
| | GATATTTTGGATACATTAACTCACTTAGGAGAATTCAGAAAAGAATGGGTGATTAAAGTTCATTACAGCT | |
| | GAATAAATGTGTCTAAAACAGACTCTTGTATTCTGAAAGTACAGTCTACAACTGATAAAACCTTATGATT | |
| | CTTTTCTCCCCCATTATGCCCCTATATATATCAAGATTTGGGTACTTTATTTTAGTAGAAAATATATATC | |
| | TTTTACATATGTATGTATTTATAAATGCATAGATATATGTATAAAAATTTGTAAGCGTTAGCGGCATTAA | |
| | TTCACCAATGCATTTGGACAACTTGATGTAACTGACTTTATTTTATGTGACTATAATAAAAAGCATAATT | |
| | TTCTCATTCTGTCAT | |
| TMEM25 | CGGCCGCCCACCTGCCGGGTAAGGGCCCCTCGGGCCCGTGGTCGGGCATCGATTGGCCCCGCCTGGCGCA | 169 |
| NM_032780.3 | GCCCCCGCCCCTGCAGCGGACTGCGGTGCTCATCAGACCTGAGCAGTTGCTCCGGCGGCGCTCGGGGAGG | |
| | GAGCCAGCAGCCTAGGGCCTAGGCCCGGGCCACCATGGCGCTGCCTCCAGGCCCAGCCGCCCTCCGGCAC | |
| | ACACTGCTGCTCCTGCCAGCCCTTCTGAGCTCAGGTTGGGGGGAGTTGGAGCCACAAATAGATGGTCAGA | |
| | CCTGGGCTGAGCGGGCACTTCGGGAGAATGAACGCCACGCCTTCACCTGCCGGGTGGCAGGGGGGCCTGG | |
| | CACCCCCAGATTGGCCTGGTATCTGGATGGACAGCTGCAGGAGGCCAGCACCTCAAGACTGCTGAGCGTG | |
| | GGAGGGGAGGCCTTCTCTGGAGGCACCAGCACCTTCACTGTCACTGCCCATCGGGCCCAGCATGAGCTCA | |
| | ACTGCTCTCTGCAGGACCCCAGAAGTGGCCGATCAGCCAACGCCTCTGTCATCCTTAATGTGCAATTCAA | |
| | GCCAGAGATTGCCCAAGTCGGCGCCAAGTACCAGGAAGCTCAGGGCCCAGGCCTCCTGGTTGTCCTGTTT | |
| | GCCCTGGTGCGTGCCAACCCGCCGGCCAATGTCACCTGGATCGACCAGGATGGGCCAGTGACTGTCAACA | |
| | CCTCTGACTTCCTGGTGCTGGATGCGCAGAACTACCCCTGGCTCACCAACCACACGGTGCAGCTGCAGCT | |
| | CCGCAGCCTGGCACACAACCTCTCGGTGGTGGCCACCAATGACGTGGGTGTCACCAGTGCGTCGCTTCCA | |
| | GCCCCAGGGCTTCTGGCTACCCGGGTGGAAGTGCCACTGCTGGGCATTGTTGTGGCTGCTGGGCTTGCAC | |
| | TGGGCACCCTCGTGGGGTTCAGCACCTTGGTGGCCTGCCTGGTCTGCAGAAAAGAGAAGAAAACCAAAGG | |
| | CCCCTCCCGGCACCCATCTCTGATATCAAGTGACTCCAACAACCTAAAACTCAACAACGTGCGCCTGCCA | |
| | CGGGAGAACATGTCCCTCCCGTCCAACCTTCAGCTCAATGACCTCACTCCAGATTCCAGAGCAGTGAAAC | |
| | CAGCAGACCGGCAGATGGCTCAGAACAACAGCCGGCCAGAGCTTCTGGACCCGGAGCCCGGCGGCCTCCT | |
| | CACCAGCCAAGGTTTCATCCGCCTCCCAGTGCTGGGCTATATCTATCGAGTGTCCAGCGTGAGCAGTGAT | |
| | GAGATCTGGCTCTGAGCCGAGGGCGAGACAGGAGTATTCTCTTGGCCTCTGGACACCCTCCCGTTCCTCC | |
| | AAGGCATCCTCTACCTAGCTAGGTCACCAACGTGAAGAAGTTATGCCACTGCCACTTTTGCTTGCCCTCC | |
| | TGGCTGGGGTGCCCTCCATGTCATGCACGTGATGCATTTCACTGGGCTGTAACCCGCAGGGGCACAGGTA | |
| | TCTTTGGCAAGGCTACCAGTTGGACGTAAGCCCCTCATGCTGACTCAGGGTGGGCCCTGCATGTGATGAC | |
| | TGGGCCCTTCCAGAGGGAGCTCTTTGGCCAGGGGTGTTCAGATGTCATCCAGCATCCAAGTGTGGCATGG | |
| | CCTGCTGTATACCCCACCCCAGTACTCCACAGCACCTTGTACAGTAGGCATGGGGGCGTGCCTGTGTGGG | |
| | GGACAGGGAGGGCCCTGCATGGATTTTCCTCCTTCCTATGCTATGTAGCCTTGTTCCCTCAGGTAAAATT | |
| | TAGGACCCTGCTAGCTGTGCAGAACCCAATTGCCCTTTGCACAGAAACCAACCCCTGACCCAGCGGTACC | |
| | GGCCAAGCACAAACGTCCTTTTTGCTGCACACGTCTCTGCCCTTCACTTCTTCTCTTCTGTCCCCACCTC | |
| | CTCTTGGGAATTCTAGGTTACACGTTGGACCTTCTCTACTACTTCACTGGGCACTAGACTTTTCTATTGG | |
| | CCTGTGCCATCGCCCAGTATTAGCACAAGTTAGGGAGGAAGAGGCAGGCGATGAGTCTAGTAGCACCCAG | |
| | GACGGCTTGTAGCTATGCATCATTTTCCTACGGCGTTAGCACTTTAAGCACATCCCCTAGGGGAGGGGGT | |
| | GAGTGAGGGGCCCAGAGCCCTCTTTGTGGCTTCCCCACGTTTGGCCTTCTGGGATTCACTGTGAGTGTCC | |
| | TGAGCTCTCGGGGTTGATGGTTTTTCTCTCAGCATGTCTCCTCCACCACGGGACCCCAGCCCTGACCAAC | |
| | CCATGGTTGCCTCATCAGCAGGAAGGTGCCCTTCCTGGAGGATGGTCGCCACAGGCACATAATTCAACAG | |
| | TGTGGAAGCTTTAGGGGAACATGGAGAAAGAAGGAGACCACATACCCCAAAGTGACCTAAGAACACTTTA | |
| | AAAAGCAACATGTAAATGATTGGAAATTAATATAGTACAGAATATATTTTTCCCTTGTTGAGATCTTCTT | |
| | TTGTAATGTTTTTCATGTTACTGCCTAGGGCGGTGCTGAGCACACAGCAAGTTTAATAAACTTGACTGAA | |
| | TTCATTTACAAAAAAAAAAAAAAAAAAAAAA | |
| PHGDH | GCAGGGATTTGGCAACCTCAGAGCCGCGAGGAGGAGGCGGAGTCGCGGAGAGTTTGAGTATTTCCGTCCA | 170 |
| NM_006623.3 | ATCAAAAGGAGACTGTAAGAGGAGGAGGAGGAGGAGATGACTGGGGAGCGGGAGCTGGAGAATACTGCCC | |
| | AGTTACTCTAGCGCGCCAGGCCGAACCGCAGCTTCTTGGCTTAGGTACTTCTACTCACAGCGGCCGATTC | |
| | CGAGGCCAACTCCAGCAATGGCTTTTGCAAATCTGCGGAAAGTGCTCATCAGTGACAGCCTGGACCCTTG | |
| | CTGCCGGAAGATCTTGCAAGATGGAGGGCTGCAGGTGGTGGAAAAGCAGAACCTTAGCAAAGAGGAGCTG | |
| | ATAGCGGAGCTGCAGGACTGTGAAGGCCTTATTGTTCGCTCTGCCACCAAGGTGACCGCTGATGTCATCA | |
| | ACGCAGCTGAGAAACTCCAGGTGGTGGGCAGGGCTGGCACAGGTGTGGACAATGTGGATCTGGAGGCCGC | |
| | AACAAGGAAGGGCATCTTGGTTATGAACACCCCCAATGGGAACAGCCTCAGTGCCGCAGAACTCACTTGT | |
| | GGAATGATCATGTGCCTGGCCAGGCAGATTCCCCAGGCGACGGCTTCGATGAAGGACGGCAAATGGGAGC | |
| | GGAAGAAGTTCATGGGAACAGAGCTGAATGGAAAGACCCTGGGAATTCTTGGCCTGGGCAGGATTGGGAG | |
| | AGAGGTAGCTACCCGGATGCAGTCCTTTGGGATGAAGACTATAGGGTATGACCCCATCATTTCCCCAGAG | |
| | GTCTCGGCCTCCTTTGGTGTTCAGCAGCTGCCCCTGGAGGAGATCTGGCCTCTCTGTGATTTCATCACTG | |
| | TGCACACTCCTCTCCTGCCCTCCACGACAGGCTTGCTGAATGACAACACCTTTGCCCAGTGCAAGAAGGG | |
| | GGTGCGTGTGGTGAACTGTGCCCGTGGAGGGATCGTGGACGAAGGCGCCCTGCTCCGGGCCCTGCAGTCT | |
| | GGCCAGTGTGCCGGGGCTGCACTGGACGTGTTTACGGAAGAGCCGCCACGGGACCGGGCCTTGGTGGACC | |
| | ATGAGAATGTCATCAGCTGTCCCCACCTGGGTGCCAGCACCAAGGAGGCTCAGAGCCGCTGTGGGGAGGA | |
| | AATTGCTGTTCAGTTCGTGGACATGGTGAAGGGGAAATCTCTCACGGGGGTTGTGAATGCCCAGGCCCTT | |
| | ACCAGTGCCTTCTCTCCACACACCAAGCCTTGGATTGGTCTGGCAGAAGCTCTGGGGACACTGATGCGAG | |
| | CCTGGGCTGGGTCCCCCAAAGGGACCATCCAGGTGATAACACAGGGAACATCCCTGAAGAATGCTGGGAA | |
| | CTGCCTAAGCCCCGCAGTCATTGTCGGCCTCCTGAAAGAGGCTTCCAAGCAGGCGGATGTGAACTTGGTG | |
| | AACGCTAAGCTGCTGGTGAAAGAGGCTGGCCTCAATGTCACCACCTCCCACAGCCCTGCTGCACCAGGGG | |
| | AGCAAGGCTTCGGGGAATGCCTCCTGGCCGTGGCCCTGGCAGGCGCCCCTTACCAGGCTGTGGGCTTGGT | |
| | CCAAGGCACTACGCCTGTACTGCAGGGGCTCAATGGAGCTGTCTTCAGGCCAGAAGTGCCTCTCCGCAGG | |
| | GACCTGCCCCTGCTCCTATTCCGGACTCAGACCTCTGACCCTGCAATGCTGCCTACCATGATTGGCCTCC | |
| | TGGCAGAGGCAGGCGTGCGGCTGCTGTCCTACCAGACTTCACTGGTGTCAGATGGGGAGACCTGGCACGT | |
| | CATGGGCATCTCCTCCTTGCTGCCCAGCCTGGAAGCGTGGAAGCAGCATGTGACTGAAGCCTTCCAGTTC | |
| | CACTTCTAACCTTGGAGCTCACTGGTCCCTGCCTCTGGGGCTTTTCTGAAGAAACCCACCCACTGTGATC | |
| | AATAGGGAGAGAAAATCCACATTCTTGGGCTGAACGCGGGCCTCTGACACTGCTTACACTGCACTCTGAC | |
| | CCTGTAGTACAGCAATAACCGTCTAATAAAGAGCCTACCCCCAACTCCTTCTGCAAAAAAA | |
| SLC9A3R1 | GGACTCTGGGACGCTCAGACGCCGCGCGGGGCGGGGATTGGTCTGTGGTCCTCTCTCGGCTCCTCGCGGC | 171 |
| NM_004252.4 | TCGCGGCGGCCGACGGTTCCTGGGACACCTGCTTGCTTGGCCCGTCCGGCGGCTCAGGGCTTCTCTGCTG | |
| | CGCTCCCGGTTCGCTGGACGGGAAGAAGGGCTGGGCCGTCCCGTCCCGTCCCCATCGGAACCCCAAGTCG | |
| | CGCCGCTGACCCGTCGCAGGGCGAGATGAGCGCGGACGCAGCGGCCGGGGCGCCCCTGCCCCGGCTCTGC | |
| | TGCCTGGAGAAGGGTCCGAACGGCTACGGCTTCCACCTGCACGGGGAGAAGGGCAAGTTGGGCCAGTACA | |
| | TCCGGCTGGTGGAGCCCGGCTCGCCGGCCGAGAAGGCGGGGCTGCTGGCGGGGGACCGGCTGGTGGAGGT | |
| | GAACGGCGAAAACGTGGAGAAGGAGACCCACCAGCAGGTGGTGAGCCGCATCCGCGCCGCACTCAACGCC | |
| | GTGCGCCTGCTGGTGGTCGACCCCGAGACGGACGAGCAGCTGCAGAAGCTCGGCGTCCAGGTCCGAGAGG | |
| | AGCTGCTGCGCGCCCAGGAAGCGCCGGGGCAGGCCGAGCCGCCGGCCGCCGCCGAGGTGCAGGGGGCTGG | |
| | CAACGAAAATGAGCCTCGCGAGGCCGACAAGAGCCACCCGGAGCAGCGCGAGCTTCGGCCTCGGCTCTGT | |
| | ACCATGAAGAAGGGCCCCAGTGGCTATGGCTTCAACCTGCACAGCGACAAGTCCAAGCCAGGCCAGTTCA | |
| | TCCGGTCAGTGGACCCAGACTCCCCGGCTGAGGCTTCAGGGCTCCGGGCCCAGGATCGCATTGTGGAGGT | |
| | GAACGGGGTCTGCATGGAGGGGAAGCAGCATGGGGACGTGGTGTCCGCCATCAGGGCTGGCGGGGACGAG | |
| | ACCAAGCTGCTGGTGGTGGACAGGGAAACTGACGAGTTCTTCAAGAAATGCAGAGTGATCCCATCTCAGG | |
| | AGCACCTGAATGGTCCCCTGCCTGTGCCCTTCACCAATGGGGAGATACAGAAGGAGAACAGTCGTGAAGC | |
| | CCTGGCAGAGGCAGCCTTGGAGAGCCCCAGGCCAGCCCTGGTGAGATCCGCCTCCAGTGACACCAGCGAG | |
| | GAGCTGAATTCCCAAGACAGCCCCCCAAAACAGGACTCCACAGCGCCCTCGTCTACCTCCTCCTCCGACC | |
| | CCATCCTAGACTTCAACATCTCCCTGGCCATGGCCAAAGAGAGGGCCCACCAGAAACGCAGCAGCAAACG | |
| | GGCCCCGCAGATGGACTGGAGCAAGAAAAACGAACTCTTCAGCAACCTCTGAGCGCCCTGCTGCCACCCA | |
| | GTGACTGGCAGGGCCGAGCCAGCATTCCACCCCACCTTTTTCCTTCTCCCCAATTACTCCCCTGAATCAA | |
| | TGTACAAATCAGCACCCACATCCCCTTTCTTGACAAATGATTTTTCTAGAGAACTATGTTCTTCCCTGAC | |
| | TTTAGGGAAGGTGAATGTGTTCCCGTCCTCCCGCAGTCAGAAAGGAGACTCTGCCTCCCTCCTCCTCACT | |
| | GAGTGCCTCATCCTACCGGGTGTCCCTTTGCCACCCTGCCTGGGACATCGCTGGAACCTGCACCATGCCA | |
| | GGATCATGGGACCAGGCGAGAGGGCACCCTCCCTTCCTCCCCCATGTGATAAATGGGTCCAGGGCTGATC | |
| | AAAGAACTCTGACTGCAGAACTGCCGCTCTCAGTGGACAGGGCATCTGTTACCCTGAGACCTGTGGCAGA | |
| | CACGTCTTGTTTTCATTTGATTTTTGTTAAGAGTGCAGTATTGCAGAGTCTAGAGGAATTTTTGTTTCCT | |
| | TGATTAACATGATTTTCCTGGTTGTTACATCCAGGGCATGGCAGTGGCCTCAGCCTTAAACTTTTGTTCC | |
| | TACTCCCACCCTCAGCGAACTGGGCAGCACGGGGAGGGTTTGGCTACCCCTGCCCATCCCTGAGCCAGGT | |
| | ACCACCATTGTAAGGAAACACTTTCAGAAATTCAGCTGGTTCCTCCAAACCCTTCAAAAAAAAAAAAAAA | |
| | AA | |
| FAM64A | CGCAGAGTTTCAAATCGGCTGCGGTGGGCGAGGAGCAGCTGTGCTGCGGCTGTGCTCGGCCTTAGTGGTG | 172 |
| NM_019013.2 | TCGGGGTCTAGTGGACAGAGAAGACTCTTGGCCAGGCAGATGGCTTCTCGGTGGCAGAACATGGGGACCT | |
| | CCGTGCGCCGGAGATCTCTCCAGCACCAGGAGCAGCTGGAGGACAGCAAGGAGCTGCAGCCTGTGGTCAG | |
| | CCATCAGGAGACCTCTGTAGGGGCCCTGGGGTCCCTGTGCAGACAGTTCCAAAGGAGGCTGCCCCTGAGA | |
| | GCCGTCAACCTCAACCTCCGCGCAGGGCCCTCCTGGAAACGCCTGGAAACCCCAGAGCCAGGTCAGCAGG | |
| | GCCTCCAGGCTGCAGCTCGCTCAGCTAAGAGTGCTTTGGGTGCCGTGTCCCAGAGAATCCAGGAGTCCTG | |
| | CCAAAGTGGCACCAAGTGGCTGGTGGAGACCCAGGTGAAGGCCAGGAGGCGGAAGAGAGGAGCACAGAAG | |
| | GGCAGTGGATCCCCAACTCACAGCCTGAGCCAGAAGAGCACCCGGCTGTCTGGAGCCGCCCCTGCCCACT | |
| | CAGCCGCAGACCCCTGGGAGAAGGAGCATCACCGCCTCTCTGTCCGGATGGGCTCACATGCCCACCCATT | |
| | ACGGCGATCAAGGCGGGAGGCTGCCTTCCGGAGCCCCTACTCCTCAACAGAGCCCCTCTGCTCTCCCAGC | |
| | GAGTCTGACAGTGACCTAGAGCCTGTGGGGGCGGGAATTCAGCATCTCCAGAAGCTGTCCCAAGAGCTAG | |
| | ATGAAGCCATTATGGCGGAAGAGAGTGGTGACATCGTCTCTCTCATTCATGACTGAGGAAGTGCCTGCAG | |
| | GAAACAAGCCCTGTCTGACCGCCAAGGCTTCATACTCAAGGATGTCTATGCTTCCCCGTGAGCTTCCTGG | |
| | AAAAAACCCCCGGGAGTCGTCAGTACCCCTGGGCCACTGCTAACAAGCACCTAACAAGGGGCCCAGAGCC | |
| | CCCTGCTCCAGCCACATCTGGACCCATCAGTGACTGCCTGCCATAGCCTGAGAGTGTCTTGGGGAGACCT | |
| | TGCAGAGGGGGAGAATTGTTCCTTCTGCTTTCCTAGGGGACTCTTGAGCTTAGAAACTCATCGTACACTT | |
| | GACCTTGAGCCTTCTATTTGCCTCATCTATAACATGAAGTGCTAGCATCAGATATTTGAGAGCTCTTAGC | |
| | TCTGTACCCGGGTGCCTGGTTTTTGGGGAGTCATCCGCAGAGTCACTCACCCACTGTGTTTCTGGTGCCA | |
| | AGGCTCTTGAGGGCCCCACTCTCATCCCTCCTTTCCCTACCAGGGACTCGGAGGAAGGCATAGGAGATAT | |
| | TTCCAGGCTTACGACCCTGGGCTCACGGGTACCTATTTATATGCTCAGTGCAGAGCACTGTGGATGTGCC | |
| | AGGAGGGGTAGCCCTGTTCAAGAGCAATTTCTGCCCTTTGTAAATTATTTAAGAAACCTGCTTTGTCATT | |
| | TTATTAGAAAGAAACCAGCGTGTGACTTTCCTAGATAACACTGCTTTCTCATAATAAAGACTATTTGCAT | |
| | TTGAAAAAAAAAAAAAAAAAAAA | |
| SEMA3C | GGACTGCGAAAGGAGCAGGGTTGCGGAGCTAGGGCTCCAGCCTGCGGCCGCGCATTCTTGCGTCTGGCCA | 173 |
| NM_006379.3 | GCCGCGAGCTCTAAGGGTCGGCCCCGCCCGGTCCGCCCCCGCGGCTCCCTGCCAGGCTCTCGCGGGCGCG | |
| | CTCGGGGTGGGGCCTCGCGGCTGGCGGAGATGCGGCCGGGGCTGCGCGGTGGTGATGCGAGCCTGCTGGG | |
| | CGGCGCGCCGGGGCAGCCGGAGCCGCGCGCCGCGGCGCTGTAATCGGACACCAAGAGCGCTCGCCCCCGG | |
| | CCTCCGGCCACTTTCCATTCACTCCGAGGTGCTTGATTGAGCGACGCGGAGAAGAGCTCCGGGTGCCGCG | |
| | GCACTGCAGCGCTGAGATTCCTTTACAAAGAAACTCAGAGGACCGGGAAGAAAGAATTTCACCTTTGCGA | |
| | CGTGCTAGAAAATAAGGTCGTCTGGGAAAAGGACTGGAGACACAAGCGCATCCAACCCCGGTAGCAAACT | |
| | GATGACTTTTCCGTGCTGATTTCTTTCAACCTCGGTATTTTCCCTTGGATATTAACTTGCATATCTGAAG | |
| | AAATGGCATTCCGGACAATTTGCGTGTTGGTTGGAGTATTTATTTGTTCTATCTGTGTGAAAGGATCTTC | |
| | CCAGCCCCAAGCAAGAGTTTATTTAACATTTGATGAACTTCGAGAAACCAAGACCTCTGAATACTTCAGC | |
| | CTTTCCCACCATCCTTTAGACTACAGGATTTTATTAATGGATGAAGATCAGGACCGGATATATGTGGGAA | |
| | GCAAAGATCACATTCTTTCCCTGAATATTAACAATATAAGTCAAGAAGCTTTGAGTGTTTTCTGGCCAGC | |
| | ATCTACAATCAAAGTTGAAGAATGCAAAATGGCTGGCAAAGATCCCACACACGGCTGTGGGAACTTTGTC | |
| | CGTGTAATTCAGACTTTCAATCGCACACATTTGTATGTCTGTGGGAGTGGCGCTTTCAGTCCTGTCTGTA | |
| | CTTACTTGAACAGAGGGAGGAGATCAGAGGACCAAGTTTTCATGATTGACTCCAAGTGTGAATCTGGAAA | |
| | AGGACGCTGCTCTTTCAACCCCAACGTGAACACGGTGTCTGTTATGATCAATGAGGAGCTTTTCTCTGGA | |
| | ATGTATATAGATTTCATGGGGACAGATGCTGCTATTTTTCGAAGTTTAACCAAGAGGAATGCGGTCAGAA | |
| | CTGATCAACATAATTCCAAATGGCTAAGTGAACCTATGTTTGTAGATGCACATGTCATCCCAGATGGTAC | |
| | TGATCCAAATGATGCTAAGGTGTACTTCTTCTTCAAAGAAAAACTGACTGACAATAACAGGAGCACGAAA | |
| | CAGATTCATTCCATGATTGCTCGAATATGTCCTAATGACACTGGTGGACTGCGTAGCCTTGTCAACAAGT | |
| | GGACCACTTTCTTAAAGGCGAGGCTGGTGTGCTCGGTAACAGATGAAGACGGCCCAGAAACACACTTTGA | |
| | TGAATTAGAGGATGTGTTTCTGCTGGAAACTGATAACCCGAGGACAACACTAGTGTATGGCATTTTTACA | |
| | ACATCAAGCTCAGTTTTCAAAGGATCAGCCGTGTGTGTGTATCATTTATCTGATATACAGACTGTGTTTA | |
| | ATGGGCCTTTTGCCCACAAAGAAGGGCCCAATCATCAGCTGATTTCCTATCAGGGCAGAATTCCATATCC | |
| | TCGCCCTGGAACTTGTCCAGGAGGAGCATTTACACCCAATATGCGAACCACCAAGGAGTTCCCAGATGAT | |
| | GTTGTCACTTTTATTCGGAACCATCCTCTCATGTACAATTCCATCTACCCAATCCACAAAAGGCCTTTGA | |
| | TTGTTCGTATTGGCACTGACTACAAGTATACAAAGATAGCTGTGGATCGAGTGAACGCTGCTGATGGGAG | |
| | ATACCATGTCCTGTTTCTCGGAACAGATCGGGGTACTGTGCAAAAAGTGGTTGTTCTTCCTACTAACAAC | |
| | TCTGTCAGTGGCGAGCTCATTCTGGAGGAGCTGGAAGTCTTTAAGAATCATGCTCCTATAACAACAATGA | |
| | AAATTTCATCTAAAAAGCAACAGTTGTATGTGAGTTCCAATGAAGGGGTTTCCCAGGTATCTCTGCACCG | |
| | CTGCCACATCTATGGTACAGCCTGTGCTGACTGCTGCCTGGCGCGGGACCCTTATTGCGCCTGGGATGGC | |
| | CATTCCTGTTCCAGATTCTACCCAACTGGGAAACGGAGGAGCCGAAGACAAGATGTGAGACATGGAAACC | |
| | CACTGACTCAATGCAGAGGATTTAATCTAAAAGCATACAGAAATGCAGCTGAAATTGTCCAGTATGGAGT | |
| | AAAAAATAACACCACTTTTCTGGAGTGTGCCCCCAAGTCTCCGCAGGCATCTATCAAGTGGCTGTTACAG | |
| | AAAGACAAAGACAGGAGGAAAGAGGTTAAGCTGAATGAACGAATAATAGCCACTTCACAGGGACTCCTGA | |
| | TCCGCTCTGTTCAGGGTTCTGACCAAGGACTTTATCACTGCATTGCTACAGAAAATAGTTTCAAGCAGAC | |
| | CATAGCCAAGATCAACTTCAAAGTTTTAGATTCAGAAATGGTGGCTGTTGTGACGGACAAATGGTCCCCA | |
| | TGGACCTGGGCCAGCTCTGTGAGGGCTTTACCCTTCCACCCGAAGGACATCATGGGGGCATTCAGCCACT | |
| | CAGAAATGCAGATGATTAACCAATATTGCAAAGACACTCGGCAGCAACATCAGCAGGGAGATGAATCACA | |
| | GAAAATGAGAGGGGACTATGGCAAGTTAAAGGCCCTCATCAATAGTCGGAAAAGTAGAAACAGGAGGAAT | |
| | CAGTTGCCAGAGTCATAATATTTTCTTATGTGGGTCTTATGCTTCCATTAACAAATGCTCTGTCTTCAAT | |
| | GATCAAATTTTGAGCAAAGAAACTTGTGCTTTACCAAGGGGAATTACTGAAAAAGGTGATTACTCCTGAA | |
| | GTGAGTTTTACACGAACTGAAATGAGCATGCATTTTCTTGTATGATAGTGACTAGCACTAGACATGTCAT | |
| | GGTCCTCATGGTGCATATAAATATATTTAACTTAACCCAGATTTTATTTATATCTTTATTCACCTTTTCT | |
| | TCAAAATCGATATGGTGGCTGCAAAACTAGAATTGTTGCATCCCTCAATTGAATGAGGGCCATATCCCTG | |
| | TGGTATTCCTTTCCTGCTTTGGGGCTTTAGAATTCTAATTGTCAGTGATTTTGTATATGAAAACAAGTTC | |
| | CAAATCCACAGCTTTTACGTAGTAAAAGTCATAAATGCATATGACAGAATGGCTATCAAAAGAAATAGAA | |
| | AAGGAAGACAGCATTTAAAGTTGTATAAAAACATGAGTTATTCATAAAGAGAAAATGATGAGTTTTTATG | |
| | GTTCCAATGAAATATGTTGGGGTTTTTTTAAGATTGTAAAAATAATCAGTTACTGGTATCTGTCACTGAC | |
| | CTTTGTTTCCTTATTCAGGAAGATAAAAATCAGTAACCTACCCCATGAAGATATTTGGTGGGAGTTATAT | |
| | CAGTGAAGCAGTTTGGTTTATATTCTTATGTTATCACCTTCCAAACAAAAGCACTTACTTTTTTTGGAAG | |
| | TTATTTATTTTAGACTCAAAGAATATAATCTGGCACTACTCAGTTATTACTGTTTGTTCTCTTATTCCCT | |
| | AGTCTGTGTGGCAAATTAAACAATATAAGAAGGAAAAATTTGAAGTATTAGACTTCTAAATAAGGTGTGA | |
| | AATCATCAAAAAGAAAAATCAAAGTAGAAACTACTAATTTTTTAAGAGGAATTTATAACAAATATGGCTA | |
| | GTTTTCAACTTCAGTACTCAAATTCAATGATTCTTCCTTTTATTAAAACCAGTCTCAGATATCATACTGA | |
| | TTTTTAAGTCAACACTATATATTTTATGATCTTTTCAGTGTGATGGCAAGGTGCTTGTTATGTCTAGAAA | |
| | GTAAGAAAACAATATGAGGAGACATTCTGTCTTTCAAAAGGTAATGGTACATACGTTCACTGGTCTCTAA | |
| | GTGTAAAAGTAGTAAATTTTGTGATGAATAAAATAATTATCTCCTAATTGTATGTTAGAATAATTTTATT | |
| | AGAATAATTTCATACTGAAATTATTTTCTCCAAATAAAAATTAGATGGAAAAATGTGAAAAAAATTATTC | |
| | ATGCTCTCATATATATTTTAAAAACACTACTTTTGCTTTTTTATTTACCTTTTAAGACATTTTCATGCTT | |
| | CCAGGTAAAAACAGATATTGTACCATGTACCTAATCCAAATATCATATAAACATTTTATTTATAGTTAAT | |
| | AATCTATGATGAAGGTAATTAAAGTAGATTATGGCCTTTTTAAGTATTGCAGTCTAAAACTTCAAAAACT | |
| | AAAATCATTGTCAAAATTAATATGATTATTAATCAGAATATCAGAATATGATTCACTATTTAAACTATGA | |
| | TAAATTATGATAATATATGAGGAGGCCTCGCTATAGCAAAAATAGTTAAAATGCTGACATAACACCAAAC | |
| | TTCATTTTTTAAAAAATCTGTTGTTCCAAATGTGTATAATTTTAAAGTAATTTCTAAAGCAGTTTATTAT | |
| | AATGGTTTGCCTGCTTAAAAGGTATAATTAAACTTCTTTTCTCTTCTACATTGACACACAGAAATGTGTC | |
| | AATGTAAAGCCAAAACCATCTTCTGTGTTTATGGCCAATCTATTCTCAAAGTTAAAAGTAAAATTGTTTC | |
| | AGAGTCACAGTTCCCTTTATTTCACATAAGCCCAAACTGATAGACAGTAACGGTGTTTAGTTTTATACTA | |
| | TATTTGTGCTATTTAATTCTTTCTATTTTCACAATTATTAAATTGTGTACACTTTCATTACTTTTAAAAA | |
| | TGTAGAAATTCTTCATGAACATAACTCTGCTGAATGTAAAAGAAAATTTTTTTTCAAAAATGCTGTTAAT | |
| | GTATACTACTGGTGGTTGATTGGTTTTATTTTATGTAGCTTGACAATTCAGTGACTTAATATCTATTCCA | |
| | TTTGTATTGTACATAAAATTTTCTAGAAATACACTTTTTTCCAAAGTGTAAGTTTGTGAATAGATTTTAG | |
| | CATGATGAAACTGTCATAATGGTGAATGTTCAATCTGTGTAAGAAAACAAACTAAATGTAGTTGTCACAC | |
| | TAAAATTTAATTGGATATTGATGAAATCATTGGCCTGGCAAAATAAAACATGTTGAATTCCCCAAAAAAA | |
| | AAAAAAAAA | |
| PGR | AGCTGAAGGCAAAGGGTCCCCGGGCTCCCCACGTGGCGGGCGGCCCGCCCTCCCCCGAGGTCGGATCCCC | 174 |
| NM_001202474.1 | ACTGCTGTGTCGCCCAGCCGCAGGTCCGTTCCCGGGGAGCCAGACCTCGGACACCTTGCCTGAAGTTTCG | |
| | GCCATACCTATCTCCCTGGACGGGCTACTCTTCCCTCGGCCCTGCCAGGGACAGGACCCCTCCGACGAAA | |
| | AGACGCAGGACCAGCAGTCGCTGTCGGACGTGGAGGGCGCATATTCCAGAGCTGAAGCTACAAGGGGTGC | |
| | TGGAGGCAGCAGTTCTAGTCCCCCAGAAAAGGACAGCGGACTGCTGGACAGTGTCTTGGACACTCTGTTG | |
| | GCGCCCTCAGGTCCCGGGCAGAGCCAACCCAGCCCTCCCGCCTGCGAGGTCACCAGCTCTTGGTGCCTGT | |
| | TTGGCCCCGAACTTCCCGAAGATCCACCGGCTGCCCCCGCCACCCAGCGGGTGTTGTCCCCGCTCATGAG | |
| | CCGGTCCGGGTGCAAGGTTGGAGACAGCTCCGGGACGGCAGCTGCCCATAAAGTGCTGCCCCGGGGCCTG | |
| | TCACCAGCCCGGCAGCTGCTGCTCCCGGCCTCTGAGAGCCCTCACTGGTCCGGGGCCCCAGTGAAGCCGT | |
| | CTCCGCAGGCCGCTGCGGTGGAGGTTGAGGAGGAGGATGGCTCTGAGTCCGAGGAGTCTGCGGGTCCGCT | |
| | TCTGAAGGGCAAACCTCGGGCTCTGGGTGGCGCGGCGGCTGGAGGAGGAGCCGCGGCTGTCCCGCCGGGG | |
| | GCGGCAGCAGGAGGCGTCGCCCTGGTCCCCAAGGAAGATTCCCGCTTCTCAGCGCCCAGGGTCGCCCTGG | |
| | TGGAGCAGGACGCGCCGATGGCGCCCGGGCGCTCCCCGCTGGCCACCACGGTGATGGATTTCATCCACGT | |
| | GCCTATCCTGCCTCTCAATCACGCCTTATTGGCAGCCCGCACTCGGCAGCTGCTGGAAGACGAAAGTTAC | |
| | GACGGCGGGGCCGGGGCTGCCAGCGCCTTTGCCCCGCCGCGGAGTTCACCCTGTGCCTCGTCCACCCCGG | |
| | TCGCTGTAGGCGACTTCCCCGACTGCGCGTACCCGCCCGACGCCGAGCCCAAGGACGACGCGTACCCTCT | |
| | CTATAGCGACTTCCAGCCGCCCGCTCTAAAGATAAAGGAGGAGGAGGAAGGCGCGGAGGCCTCCGCGCGC | |
| | TCCCCGCGTTCCTACCTTGTGGCCGGTGCCAACCCCGCAGCCTTCCCGGATTTCCCGTTGGGGCCACCGC | |
| | CCCCGCTGCCGCCGCGAGCGACCCCATCCAGACCCGGGGAAGCGGCGGTGACGGCCGCACCCGCCAGTGC | |
| | CTCAGTCTCGTCTGCGTCCTCCTCGGGGTCGACCCTGGAGTGCATCCTGTACAAAGCGGAGGGCGCGCCG | |
| | CCCCAGCAGGGCCCGTTCGCGCCGCCGCCCTGCAAGGCGCCGGGCGCGAGCGGCTGCCTGCTCCCGCGGG | |
| | ACGGCCTGCCCTCCACCTCCGCCTCTGCCGCCGCCGCCGGGGCGGCCCCCGCGCTCTACCCTGCACTCGG | |
| | CCTCAACGGGCTCCCGCAGCTCGGCTACCAGGCCGCCGTGCTCAAGGAGGGCCTGCCGCAGGTCTACCCG | |
| | CCCTATCTCAACTACCTGAGGCCGGATTCAGAAGCCAGCCAGAGCCCACAATACAGCTTCGAGTCATTAC | |
| | CTCAGAAGATTTGTTTAATCTGTGGGGATGAAGCATCAGGCTGTCATTATGGTGTCCTTACCTGTGGGAG | |
| | CTGTAAGGTCTTCTTTAAGAGGGCAATGGAAGGGCAGCACAACTACTTATGTGCTGGAAGAAATGACTGC | |
| | ATCGTTGATAAAATCCGCAGAAAAAACTGCCCAGCATGTCGCCTTAGAAAGTGCTGTCAGGCTGGCATGG | |
| | TCCTTGGAGGTCGAAAATTTAAAAAGTTCAATAAAGTCAGAGTTGTGAGAGCACTGGATGCTGTTGCTCT | |
| | CCCACAGCCAGTGGGCGTTCCAAATGAAAGCCAAGCCCTAAGCCAGAGATTCACTTTTTCACCAGGTCAA | |
| | GACATACAGTTGATTCCACCACTGATCAACCTGTTAATGAGCATTGAACCAGATGTGATCTATGCAGGAC | |
| | ATGACAACACAAAACCTGACACCTCCAGTTCTTTGCTGACAAGTCTTAATCAACTAGGCGAGAGGCAACT | |
| | TCTTTCAGTAGTCAAGTGGTCTAAATCATTGCCAGGTTTTCGAAACTTACATATTGATGACCAGATAACT | |
| | CTCATTCAGTATTCTTGGATGAGCTTAATGGTGTTTGGTCTAGGATGGAGATCCTACAAACACGTCAGTG | |
| | GGCAGATGCTGTATTTTGCACCTGATCTAATACTAAATGAACAGCGGATGAAAGAATCATCATTCTATTC | |
| | ATTATGCCTTACCATGTGGCAGATCCCACAGGAGTTTGTCAAGCTTCAAGTTAGCCAAGAAGAGTTCCTC | |
| | TGTATGAAAGTATTGTTACTTCTTAATACAATTCCTTTGGAAGGGCTACGAAGTCAAACCCAGTTTGAGG | |
| | AGATGAGGTCAAGCTACATTAGAGAGCTCATCAAGGCAATTGGTTTGAGGCAAAAAGGAGTTGTGTCGAG | |
| | CTCACAGCGTTTCTATCAACTTACAAAACTTCTTGATAACTTGCATGATCTTGTCAAACAACTTCATCTG | |
| | TACTGCTTGAATACATTTATCCAGTCCCGGGCACTGAGTGTTGAATTTCCAGAAATGATGTCTGAAGTTA | |
| | TTGCTGCACAATTACCCAAGATATTGGCAGGGATGGTGAAACCCCTTCTCTTTCATAAAAAGTGAATGTC | |
| | ATCTTTTTCTTTTAAAGAATTAAATTTTGTGGTATGTCTTTTTGTTTTGGTCAGGATTATGAGGTCTTGA | |
| | GTTTTTATAATGTTCTTCTGAAAGCCTTACATTTATAACATCATAGTGTGTAAATTTAAAAGAAAAATTG | |
| | TGAGGTTCTAATTATTTTCTTTTATAAAGTATAATTAGAATGTTTAACTGTTTTGTTTACCCATATTTTC | |
| | TTGAAGAATTTACAAGATTGAAAAAGTACTAAAATTGTTAAAGTAAACTATCTTATCCATATTATTTCAT | |
| | ACCATGTAGGTGAGGATTTTTAACTTTTGCATCTAACAAATCATCGACTTAAGAGAAAAAATCTTACATG | |
| | TAATAACACAAAGCTATTATATGTTATTTCTAGGTAACTCCCTTTGTGTCAATTATATTTCCAAAAATGA | |
| | ACCTTTAAAATGGTATGCAAAATTTTGTCTATATATATTTGTGTGAGGAGGAAATTCATAACTTTCCTCA | |
| | GATTTTCAAAAGTATTTTTAATGCAAAAAATGTAGAAAGAGTTTAAAACCACTAAAATAGATTGATGTTC | |
| | TTCAAACTAGGCAAAACAACTCATATGTTAAGACCATTTTCCAGATTGGAAACACAAATCTCTTAGGAAG | |
| | TTAATAAGTAGATTCATATCATTATGCAAATAGTATTGTGGGTTTTGTAGGTTTTTAAAATAACCTTTTT | |
| | TGGGGAGAGAATTGTCCTCTAATGAGGTATTGCGAGTGGACATAAGAAATCAGAAGATTATGGCCTAACT | |
| | GTACTCCTTACCAACTGTGGCATGCTGAAAGTTAGTCACTCTTACTGATTCTCAATTCTCTCACCTTTGA | |
| | AAGTAGTAAAATATCTTTCCTGCCAATTGCTCCTTTGGGTCAGAGCTTATTAACATCTTTTCAAATCAAA | |
| | GGAAAGAAGAAAGGGAGAGGAGGAGGAGGGAGGTATCAATTCACATACCTTTCTCCTCTTTATCCTCCAC | |
| | TATCATGAATTCATATTATGTTTCAGCCATGCAAATCTTTTTACCATGAAATTTCTTCCAGAATTTTCCC | |
| | CCTTTGACACAAATTCCATGCATGTTTCAACCTTCGAGACTCAGCCAAATGTCATTTCTGTAAAATCTTC | |
| | CCTGAGTCTTCCAAGCAGTAATTTGCCTTCTCCTAGAGTTTACCTGCCATTTTGTGCACATTTGAGTTAC | |
| | AGTAGCATGTTATTTTACAATTGTGACTCTCCTGGGAGTCTGGGAGCCATATAAAGTGGTCAATAGTGTT | |
| | TGCTGACTGAGAGTTGAATGACATTTTCTCTCTGTCTTGGTATTACTGTAGATTTCGATCATTCTTTGGT | |
| | TACATTTCTGCATATTTCTGTACCCATGACTTTATCACTTTCTTCTCCCATGCTTTATCTCCATCAATTA | |
| | TCTTCATTACTTTTAAATTTTCCACCTTTGCTTCCTACTTTGTGAGATCTCTCCCTTTACTGACTATAAC | |
| | ATAGAAGAATAGAAGTGTATTTTATGTGTCTTAAGGACAATACTTTAGATTCCTTGTTCTAAGTTTTTAA | |
| | ACTGAATGAATGGAATATTATTTCTCTCCCTAAGCAAAATTCCACAAAACAATTATTTCTTATGTTTATG | |
| | TAGCCTTAAATTGTTTTGTACTGTAAACCTCAGCATAAAAACTTTCTTCATTTCTAATTTCATTCAACAA | |
| | ATATTGATTGAATACCTGGTATTAGCACAAGAAAAATGTGCTAATAAGCCTTATGAGAATTTGGAGCTGA | |
| | AGAAAGACATATAACTCAGGAAAGTTACAGTCCAGTAGTAGGTATAAATTACAGTGCCTGATAAATAGGC | |
| | ATTTTAATATTTGTACACTCAACGTATACTAGGTAGGTGCAAAACATTTACATATAATTTTACTGATACC | |
| | CATGCAGCACAAAGGTACTAACTTTAAATATTAAATAACACCTTTATGTGTCAGTAATTCATTTGCATTA | |
| | AATCTTATTGAAAAGGCTTTCAATATATTTTCCCCACAAATGTCATCCCAAGAAAAAAGTATTTTTAACA | |
| | TCTCCCAAATATAATAGTTACAGGAAATCTACCTCTGTGAGAGTGACACCTCTCAGAATGAACTGTGTGA | |
| | CACAAGAAAATGAATGTAGGTCTATCCAAAAAAAACCCCAAGAAACAAAAACAATATTATTAGCCCTTTA | |
| | TGCTTAAGTGATGGACTCAGGGAACAGTTGATGTTGTGATCATTTTATTATCTGATTCTTGTTACTTTGA | |
| | ATTAAACCAATATTTTGATGATATAAATCATTTCCACCAGCATATATTTAATTTCCATAATAACTTTAAA | |
| | ATTTTCTAATTTCACTCAACTATGAGGGAATAGAATGTGGTGGCCACAGGTTTGGCTTTTGTTAAAATGT | |
| | TTGATATCTTCGATGTTGATCTCTGTCTGCAATGTAGATGTCTAAACACTAGGATTTAATATTTAAGGCT | |
| | AAGCTTTAAAAATAAAGTACCTTTTTAAAAAGAATATGGCTTCACCAAATGGAAAATACCTAATTTCTAA | |
| | ATCTTTTTCTCTACAAAGTCCTATCTACTAATGTCTCCATTACTATTTAGTCATCATAACCATTATCTTC | |
| | ATTTTACATGTCGTGTTCTTTCTGGTAGCTCTAAAATGACACTAAATCATAAGAAGACAGGTTACATATC | |
| | AGGAAATACTTGAAGGTTACTGAAATAGATTCTTGAGTTAATGAAAATATTTTCTGTAAAAAGGTTTGAA | |
| | AAGCCATTTGAGTCTAAAGCATTATACCTCCATTATCAGTAGTTATGTGACAATTGTGTGTGTGTTTAAT | |
| | GTTTAAAGATGTGGCACTTTTTAATAAGGCAATGCTATGCTATTTTTTCCCATTTAACATTAAGATAATT | |
| | TATTGCTATACAGATGATATGGAAATATGATGAACAATATTTTTTTTGCCAAAACTATGCCTTGTAAGTA | |
| | GCCATGGAATGTCAACCTGTAACTTAAATTATCCACAGATAGTCATGTGTTTGATGATGGGCACTGTGGA | |
| | GATAACTGACATAGGACTGTGCCCCCCTTCTCTGCCACTTACTAGCTGGATGAGATTAAGCAAGTCATTT | |
| | AACTGCTCTGATTAAACCTGCCTTTCCCAAGTGCTTTGTAATGAATAGAAATGGAAACCAAAAAAAACGT | |
| | ATACAGGCCTTCAGAAATAGTAATTGCTACTATTTTGTTTTCATTAAGCCATAGTTCTGGCTATAATTTT | |
| | ATCAAACTCACCAGCTATATTCTACAGTGAAAGCAGGATTCTAGAAAGTCTCACTGTTTTATTTATGTCA | |
| | CCATGTGCTATGATATATTTGGTTGAATTCATTTGAAATTAGGGCTGGAAGTATTCAAGTAATTTCTTCT | |
| | GCTGAAAAAATACAGTGTTTTGAGTTTAGGGCCTGTTTTATCAAAGTTCTAAAGAGCCTATCACTCTTCC | |
| | ATTGTAGACATTTTAAAATAATGACACTGATTTTAACATTTTTAAGTGTCTTTTTAGAACAGAGAGCCTG | |
| | ACTAGAACACAGCCCCTCCAAAAACCCATGCTCAAATTATTTTTACTATGGCAGCAATTCCACAAAAGGG | |
| | AACAATGGGTTTAGAAATTACAATGAAGTCATCAACCCAAAAAACATCCCTATCCCTAAGAAGGTTATGA | |
| | TATAAAATGCCCACAAGAAATCTATGTCTGCTTTAATCTGTCTTTTATTGCTTTGGAAGGATGGCTATTA | |
| | CATTTTTAGTTTTTGCTGTGAATACCTGAGCAGTTTCTCTCATCCATACTTATCCTTCACACATCAGAAG | |
| | TCAGGATAGAATATGAATCATTTTAAAAACTTTTACAACTCCAGAGCCATGTGCATAAGAAGCATTCAAA | |
| | ACTTGCCAAAACATACATTTTTTTTCAAATTTAAAGATACTCTATTTTTGTATTCAATAGCTCAACAACT | |
| | GTGGTCCCCACTGATAAAGTGAAGTGGACAAGGAGACAAGTAATGGCATAAGTTTGTTTTTCCCAAAGTA | |
| | TGCCTGTTCAATAGCCATTGGATGTGGGAAATTTCTACATCTCTTAAAATTTTACAGAAAATACATAGCC | |
| | AGATAGTCTAGCAAAAGTTCACCAAGTCCTAAATTGCTTATCCTTACTTCACTAAGTCATGAAATCATTT | |
| | TAATGAAAAGAACATCACCTAGGTTTTGTGGTTTCTTTTTTTCTTATTCATGGCTGAGTGAAAACAACAA | |
| | TCTCTGTTTCTCCCTAGCATCTGTGGACTATTTAATGTACCATTATTCCACACTCTATGGTCCTTACTAA | |
| | ATACAAAATTGAACAAAAAGCAGTAAAACAACTGACTCTTCACCCATATTATAAAATATAATCCAAGCCA | |
| | GATTAGTCAACATCCATAAGATGAATCCAAGCTGAACTGGGCCTAGATTATTGAGTTCAGGTTGGATCAC | |
| | ATCCCTATTTATTAATAAACTTAGGAAAGAAGGCCTTACAGACCATCAGTTAGCTGGAGCTAATAGAACC | |
| | TACACTTCTAAAGTTCGGCCTAGAATCAATGTGGCCTTAAAAGCTGAAAAGAAGCAGGAAAGAACAGTTT | |
| | TCTTCAATAATTTGTCCACCCTGTCACTGGAGAAAATTTAAGAATTTGGGGGTGTTGGTAGTAAGTTAAA | |
| | CACAGCAGCTGTTCATGGCAGAAATTATTCAATACATACCTTCTCTGAATATCCTATAACCAAAGCAAAG | |
| | AAAAACACCAAGGGGTTTGTTCTCCTCCTTGGAGTTGACCTCATTCCAAGGCAGAGCTCAGGTCACAGGC | |
| | ACAGGGGCTGCGCCCAAGCTTGTCCGCAGCCTTATGCAGCTGTGGAGTCTGGAAGACTGTTGCAGGACTG | |
| | CTGGCCTAGTCCCAGAATGTCAGCCTCATTTTCGATTTACTGGCTCTTGTTGCTGTATGTCATGCTGACC | |
| | TTATTGTTAAACACAGGTTTGTTTGCTTTTTTTCCACTCATGGAGACATGGGAGAGGCATTATTTTTAAG | |
| | CTGGTTGAAAGCTTTAACCGATAAAGCATTTTTAGAGAAATGTGAATCAGGCAGCTAAGAAAGCATACTC | |
| | TGTCCATTACGGTAAAGAAAATGCACAGATTATTAACTCTGCAGTGTGGCATTAGTGTCCTGGTCAATAT | |
| | TCGGATAGATATGAATAAAATATTTAAATGGTATTGTAAATAGTTTTCAGGACATATGCTATAGCTTATT | |
| | TTTATTATCTTTTGAAATTGCTCTTAATACATCAAATCCTGATGTATTCAATTTATCAGATATAAATTAT | |
| | TCTAAATGAAGCCCAGTTAAATGTTTTTGTCTTGTCAGTTATATGTTAAGTTTCTGATCTCTTTGTCTAT | |
| | GACGTTTACTAATCTGCATTTTTACTGTTATGAATTATTTTAGACAGCAGTGGTTTCAAGCTTTTTGCCA | |
| | CTAAAAATACCTTTTATTTTCTCCTCCCCCAGAAAAGTCTATACCTTGAAGTATCTATCCACCAAACTGT | |
| | ACTTCTATTAAGAAATAGTTATTGTGTTTTCTTAATGTTTTGTTATTCAAAGACATATCAATGAAAGCTG | |
| | CTGAGCAGCATGAATAACAATTATATCCACACAGATTTGATATATTTTGTGCAGCCTTAACTTGATAGTA | |
| | TAAAATGTCATTGCTTTTTAAATAATAGTTAGTCAATGGACTTCTATCATAGCTTTCCTAAACTAGGTTA | |
| | AGATCCAGAGCTTTGGGGTCATAATATATTACATACAATTAAGTTATCTTTTTCTAAGGGCTTTAAAATT | |
| | CATGAGAATAACCAAAAAAGGTATGTGGAGAGTTAATACAAACATACCATATTCTTGTTGAAACAGAGAT | |
| | GTGGCTCTGCTTGTTCTCCATAAGGTAGAAATACTTTCCAGAATTTGCCTAAACTAGTAAGCCCTGAATT | |
| | TGCTATGATTAGGGATAGGAAGAGATTTTCACATGGCAGACTTTAGAATTCTTCACTTTAGCCAGTAAAG | |
| | TATCTCCTTTTGATCTTAGTATTCTGTGTATTTTAACTTTTCTGAGTTGTGCATGTTTATAAGAAAAATC | |
| | AGCACAAAGGGTTTAAGTTAAAGCCTTTTTACTGAAATTTGAAAGAAACAGAAGAAAATATCAAAGTTCT | |
| | TTGTATTTTGAGAGGATTAAATATGATTTACAAAAGTTACATGGAGGGCTCTCTAAAACATTAAATTAAT | |
| | TATTTTTTGTTGAAAAGTCTTACTTTAGGCATCATTTTATTCCTCAGCAACTAGCTGTGAAGCCTTTACT | |
| | GTGCTGTATGCCAGTCACTCTGCTAGATTGTGGAGATTACCAGTGTTCCCGTCTTCTCCGAGCTTAGAGT | |
| | TGGATGGGGAATAAAGACAGGTAAACAGATAGCTACAATATTGTACTGTGAATGCTTATGCTGGAGGAAG | |
| | TACAGGGAACTATTGGAGCACCTAAGAGGAGCACCTACCTTGAATTTAGGGGTTAGCAGAGGCATCCTGA | |
| | AAAAAGTCAAAGCTAAGCCACAATCTATAAGCAGTTTAGGAATTAGCAGAACGTGCGTGGTGAGGAGATG | |
| | CCAAAGGCAAGAAGAGAAGAGTATTCCAAACAGGAGGGATTCCAAAGAGAGAAGAGTATCCCAAACAACA | |
| | TTTGCACAAACCTGATGGGGAGAGAGAATGTGGGGTGGGGATGGATGATGAGACTGAAGAAGAAAGCCAG | |
| | GTCTAGATAATCAGTGGCCTTGTACACCATGTTAAAGAGTGTAGACTTGATTCTGTTGTAAACAGGAAAG | |
| | CAGCACAATTCATATGAATATTTTAGAAGACTCCCACTGGAATATGGAGAATAAAGTTGGAGATGACTAA | |
| | TCCTGGAAGCAGGGAGAACATTTTTGAGGAAGTTGCACTATTTTGGTGAAAATGATGATCATAAACATGA | |
| | AGAATTGTAGGTGATCATGACCTCCTCTCTAATTTTCCAGAAGGGTTTTGGAAGATATAACATAGGAACA | |
| | TTGACAGGACTGACGAAAGGAGATGAAATACACCATATAAATTGTCAAACACAAGGCCAGATGTCTAATT | |
| | ATTTTGCTTATGTGTTGAAATTACAAATTTTTCATCAGGAAACCAAAAACTACAAAACTTAGTTTTCCCA | |
| | AGTCCCAGAATTCTATCTGTCCAAACAATCTGTACCACTCCACCTATATCCCTACCTTTGCATGTCTGTC | |
| | CAACCTCAAAGTCCAGGTCTATACACACGGGTAAGACTAGAGCAGTTCAAGTTTCAGAAAATGAGAAAGA | |
| | GGAACTGAGTTGTGCTGAACCCATACAAAATAAACACATTCTTTGTATAGATTCTTGGAACCTCGAGAGG | |
| | AATTCACCTAACTCATAGGTATTTGATGGTATGAATCCATGGCTGGGCTCGGCTTTTAAAAAGCCTTATC | |
| | TGGGATTCCTTCTATGGAACCAAGTTCCATCAAAGCCCATTTAAAAGCCTACATTAAAAACAAAATTCTT | |
| | GCTGCATTGTATACAAATAATGATGTCATGATCAAATAATCAGATGCCATTATCAAGTGGAATTACAAAA | |
| | TGGTATACCCACTCCAAAAAAAAAAAAAAAGCTAAATTCTCAGTAGAACATTGTGACTTCATGAGCCCTC | |
| | CACAGCCTTGGAGCTGAGGAGGGAGCACTGGTGAGCAGTAGGTTGAAGAGAAAACTTGGCGCTTAATAAT | |
| | CTATCCATGTTTTTTCATCTAAAAGAGCCTTCTTTTTGGATTACCTTATTCAATTTCCATCAAGGAAATT | |
| | GTTAGTTCCACTAACCAGACAGCAGCTGGGAAGGCAGAAGCTTACTGTATGTACATGGTAGCTGTGGGAA | |
| | GGAGGTTTCTTTCTCCAGGTCCTCACTGGCCATACACCAGTCCCTTGTTAGTTATGCCTGGTCATAGACC | |
| | CCCGTTGCTATCATCTCATATTTAAGTCTTTGGCTTGTGAATTTATCTATTCTTTCAGCTTCAGCACTGC | |
| | AGAGTGCTGGGACTTTGCTAACTTCCATTTCTTGCTGGCTTAGCACATTCCTCATAGGCCCAGCTCTTTT | |
| | CTCATCTGGCCCTGCTGTGGAGTCACCTTGCCCCTTCAGGAGAGCCATGGCTTACCACTGCCTGCTAAGC | |
| | CTCCACTCAGCTGCCACCACACTAAATCCAAGCTTCTCTAAGATGTTGCAGACTTTACAGGCAAGCATAA | |
| | AAGGCTTGATCTTCCTGGACTTCCCTTTACTTGTCTGAATCTCACCTCCTTCAACTTTCAGTCTCAGAAT | |
| | GTAGGCATTTGTCCTCTTTGCCCTACATCTTCCTTCTTCTGAATCATGAAAGCCTCTCACTTCCTCTTGC | |
| | TATGTGCTGGAGGCTTCTGTCAGGTTTTAGAATGAGTTCTCATCTAGTCCTAGTAGCTTTTGATGCTTAA | |
| | GTCCACCTTTTAAGGATACCTTTGAGATTTAGACCATGTTTTTCGCTTGAGAAAGCCCTAATCTCCAGAC | |
| | TTGCCTTTCTGTGGATTTCAAAGACCAACTGAGGAAGTCAAAAGCTGAATGTTGACTTTCTTTGAACATT | |
| | TCCGCTATAACAATTCCAATTCTCCTCAGAGCAATATGCCTGCCTCCAACTGACCAGGAGAAAGGTCCAG | |
| | TGCCAAAGAGAAAAACACAAAGATTAATTATTTCAGTTGAGCACATACTTTCAAAGTGGTTTGGGTATTC | |
| | ATATGAGGTTTTCTGTCAAGAGGGTGAGACTCTTCATCTATCCATGTGTGCCTGACAGTTCTCCTGGCAC | |
| | TGGCTGGTAACAGATGCAAAACTGTAAAAATTAAGTGATCATGTATTTTAACGATATCATCACATACTTA | |
| | TTTTCTATGTAATGTTTTAAATTTCCCCTAACATACTTTGACTGTTTTGCACATGGTAGATATTCACATT | |
| | TTTTTGTGTTGAAGTTGATGCAATCTTCAAAGTTATCTACCCCGTTGCTTATTAGTAAAACTAGTGTTAA | |
| | TACTTGGCAAGAGATGCAGGGAATCTTTCTCATGACTCACGCCCTATTTAGTTATTAATGCTACTACCCT | |
| | ATTTTGAGTAAGTAGTAGGTCCCTAAGTACATTGTCCAGAGTTATACTTTTAAAGATATTTAGCCCCATA | |
| | TACTTCTTGAATCTAAAGTCATACACCTTGCTCCTCATTTCTGAGTGGGAAAGACATTTGAGAGTATGTT | |
| | GACAATTGTTCTGAAGGTTTTTGCCAAGAAGGTGAAACTGTCCTTTCATCTGTGTATGCCTGGGGCTGGG | |
| | TCCCTGGCAGTGATGGGGTGACAATGCAAAGCTGTAAAAACTAGGTGCTAGTGGGCACCTAATATCATCA | |
| | TCATATACTTATTTTCAAGCTAATATGCAAAATCCCATCTCTGTTTTTAAACTAAGTGTAGATTTCAGAG | |
| | AAAATATTTTGTGGTTCACATAAGAAAACAGTCTACTCAGCTTGACAAGTGTTTTATGTTAAATTGGCTG | |
| | GTGGTTTGAAATGAATCATCTTCACATAATGTTTTCTTTAAAAATATTGTGAATTTAACTCTAATTCTTG | |
| | TTATTCTGTGTGATAATAAAGAATAAACTAATTTCTA | |
| BCL2 | TTTCTGTGAAGCAGAAGTCTGGGAATCGATCTGGAAATCCTCCTAATTTTTACTCCCTCTCCCCGCGACT | 175 |
| NM_000633.2 | CCTGATTCATTGGGAAGTTTCAAATCAGCTATAACTGGAGAGTGCTGAAGATTGATGGGATCGTTGCCTT | |
| | ATGCATTTGTTTTGGTTTTACAAAAAGGAAACTTGACAGAGGATCATGCTGTACTTAAAAAATACAACAT | |
| | CACAGAGGAAGTAGACTGATATTAACAATACTTACTAATAATAACGTGCCTCATGAAATAAAGATCCGAA | |
| | AGGAATTGGAATAAAAATTTCCTGCATCTCATGCCAAGGGGGAAACACCAGAATCAAGTGTTCCGCGTGA | |
| | TTGAAGACACCCCCTCGTCCAAGAATGCAAAGCACATCCAATAAAATAGCTGGATTATAACTCCTCTTCT | |
| | TTCTCTGGGGGCCGTGGGGTGGGAGCTGGGGCGAGAGGTGCCGTTGGCCCCCGTTGCTTTTCCTCTGGGA | |
| | AGGATGGCGCACGCTGGGAGAACAGGGTACGATAACCGGGAGATAGTGATGAAGTACATCCATTATAAGC | |
| | TGTCGCAGAGGGGCTACGAGTGGGATGCGGGAGATGTGGGCGCCGCGCCCCCGGGGGCCGCCCCCGCACC | |
| | GGGCATCTTCTCCTCCCAGCCCGGGCACACGCCCCATCCAGCCGCATCCCGGGACCCGGTCGCCAGGACC | |
| | TCGCCGCTGCAGACCCCGGCTGCCCCCGGCGCCGCCGCGGGGCCTGCGCTCAGCCCGGTGCCACCTGTGG | |
| | TCCACCTGACCCTCCGCCAGGCCGGCGACGACTTCTCCCGCCGCTACCGCCGCGACTTCGCCGAGATGTC | |
| | CAGCCAGCTGCACCTGACGCCCTTCACCGCGCGGGGACGCTTTGCCACGGTGGTGGAGGAGCTCTTCAGG | |
| | GACGGGGTGAACTGGGGGAGGATTGTGGCCTTCTTTGAGTTCGGTGGGGTCATGTGTGTGGAGAGCGTCA | |
| | ACCGGGAGATGTCGCCCCTGGTGGACAACATCGCCCTGTGGATGACTGAGTACCTGAACCGGCACCTGCA | |
| | CACCTGGATCCAGGATAACGGAGGCTGGGATGCCTTTGTGGAACTGTACGGCCCCAGCATGCGGCCTCTG | |
| | TTTGATTTCTCCTGGCTGTCTCTGAAGACTCTGCTCAGTTTGGCCCTGGTGGGAGCTTGCATCACCCTGG | |
| | GTGCCTATCTGGGCCACAAGTGAAGTCAACATGCCTGCCCCAAACAAATATGCAAAAGGTTCACTAAAGC | |
| | AGTAGAAATAATATGCATTGTCAGTGATGTACCATGAAACAAAGCTGCAGGCTGTTTAAGAAAAAATAAC | |
| | ACACATATAAACATCACACACACAGACAGACACACACACACACAACAATTAACAGTCTTCAGGCAAAACG | |
| | TCGAATCAGCTATTTACTGCCAAAGGGAAATATCATTTATTTTTTACATTATTAAGAAAAAAAGATTTAT | |
| | TTATTTAAGACAGTCCCATCAAAACTCCTGTCTTTGGAAATCCGACCACTAATTGCCAAGCACCGCTTCG | |
| | TGTGGCTCCACCTGGATGTTCTGTGCCTGTAAACATAGATTCGCTTTCCATGTTGTTGGCCGGATCACCA | |
| | TCTGAAGAGCAGACGGATGGAAAAAGGACCTGATCATTGGGGAAGCTGGCTTTCTGGCTGCTGGAGGCTG | |
| | GGGAGAAGGTGTTCATTCACTTGCATTTCTTTGCCCTGGGGGCTGTGATATTAACAGAGGGAGGGTTCCT | |
| | GTGGGGGGAAGTCCATGCCTCCCTGGCCTGAAGAAGAGACTCTTTGCATATGACTCACATGATGCATACC | |
| | TGGTGGGAGGAAAAGAGTTGGGAACTTCAGATGGACCTAGTACCCACTGAGATTTCCACGCCGAAGGACA | |
| | GCGATGGGAAAAATGCCCTTAAATCATAGGAAAGTATTTTTTTAAGCTACCAATTGTGCCGAGAAAAGCA | |
| | TTTTAGCAATTTATACAATATCATCCAGTACCTTAAGCCCTGATTGTGTATATTCATATATTTTGGATAC | |
| | GCACCCCCCAACTCCCAATACTGGCTCTGTCTGAGTAAGAAACAGAATCCTCTGGAACTTGAGGAAGTGA | |
| | ACATTTCGGTGACTTCCGCATCAGGAAGGCTAGAGTTACCCAGAGCATCAGGCCGCCACAAGTGCCTGCT | |
| | TTTAGGAGACCGAAGTCCGCAGAACCTGCCTGTGTCCCAGCTTGGAGGCCTGGTCCTGGAACTGAGCCGG | |
| | GGCCCTCACTGGCCTCCTCCAGGGATGATCAACAGGGCAGTGTGGTCTCCGAATGTCTGGAAGCTGATGG | |
| | AGCTCAGAATTCCACTGTCAAGAAAGAGCAGTAGAGGGGTGTGGCTGGGCCTGTCACCCTGGGGCCCTCC | |
| | AGGTAGGCCCGTTTTCACGTGGAGCATGGGAGCCACGACCCTTCTTAAGACATGTATCACTGTAGAGGGA | |
| | AGGAACAGAGGCCCTGGGCCCTTCCTATCAGAAGGACATGGTGAAGGCTGGGAACGTGAGGAGAGGCAAT | |
| | GGCCACGGCCCATTTTGGCTGTAGCACATGGCACGTTGGCTGTGTGGCCTTGGCCCACCTGTGAGTTTAA | |
| | AGCAAGGCTTTAAATGACTTTGGAGAGGGTCACAAATCCTAAAAGAAGCATTGAAGTGAGGTGTCATGGA | |
| | TTAATTGACCCCTGTCTATGGAATTACATGTAAAACATTATCTTGTCACTGTAGTTTGGTTTTATTTGAA | |
| | AACCTGACAAAAAAAAAGTTCCAGGTGTGGAATATGGGGGTTATCTGTACATCCTGGGGCATTAAAAAAA | |
| | AAATCAATGGTGGGGAACTATAAAGAAGTAACAAAAGAAGTGACATCTTCAGCAAATAAACTAGGAAATT | |
| | TTTTTTTCTTCCAGTTTAGAATCAGCCTTGAAACATTGATGGAATAACTCTGTGGCATTATTGCATTATA | |
| | TACCATTTATCTGTATTAACTTTGGAATGTACTCTGTTCAATGTTTAATGCTGTGGTTGATATTTCGAAA | |
| | GCTGCTTTAAAAAAATACATGCATCTCAGCGTTTTTTTGTTTTTAATTGTATTTAGTTATGGCCTATACA | |
| | CTATTTGTGAGCAAAGGTGATCGTTTTCTGTTTGAGATTTTTATCTCTTGATTCTTCAAAAGCATTCTGA | |
| | GAAGGTGAGATAAGCCCTGAGTCTCAGCTACCTAAGAAAAACCTGGATGTCACTGGCCACTGAGGAGCTT | |
| | TGTTTCAACCAAGTCATGTGCATTTCCACGTCAACAGAATTGTTTATTGTGACAGTTATATCTGTTGTCC | |
| | CTTTGACCTTGTTTCTTGAAGGTTTCCTCGTCCCTGGGCAATTCCGCATTTAATTCATGGTATTCAGGAT | |
| | TACATGCATGTTTGGTTAAACCCATGAGATTCATTCAGTTAAAAATCCAGATGGCAAATGACCAGCAGAT | |
| | TCAAATCTATGGTGGTTTGACCTTTAGAGAGTTGCTTTACGTGGCCTGTTTCAACACAGACCCACCCAGA | |
| | GCCCTCCTGCCCTCCTTCCGCGGGGGCTTTCTCATGGCTGTCCTTCAGGGTCTTCCTGAAATGCAGTGGT | |
| | GCTTACGCTCCACCAAGAAAGCAGGAAACCTGTGGTATGAAGCCAGACCTCCCCGGCGGGCCTCAGGGAA | |
| | CAGAATGATCAGACCTTTGAATGATTCTAATTTTTAAGCAAAATATTATTTTATGAAAGGTTTACATTGT | |
| | CAAAGTGATGAATATGGAATATCCAATCCTGTGCTGCTATCCTGCCAAAATCATTTTAATGGAGTCAGTT | |
| | TGCAGTATGCTCCACGTGGTAAGATCCTCCAAGCTGCTTTAGAAGTAACAATGAAGAACGTGGACGTTTT | |
| | TAATATAAAGCCTGTTTTGTCTTTTGTTGTTGTTCAAACGGGATTCACAGAGTATTTGAAAAATGTATAT | |
| | ATATTAAGAGGTCACGGGGGCTAATTGCTGGCTGGCTGCCTTTTGCTGTGGGGTTTTGTTACCTGGTTTT | |
| | AATAACAGTAAATGTGCCCAGCCTCTTGGCCCCAGAACTGTACAGTATTGTGGCTGCACTTGCTCTAAGA | |
| | GTAGTTGATGTTGCATTTTCCTTATTGTTAAAAACATGTTAGAAGCAATGAATGTATATAAAAGCCTCAA | |
| | CTAGTCATTTTTTTCTCCTCTTCTTTTTTTTCATTATATCTAATTATTTTGCAGTTGGGCAACAGAGAAC | |
| | CATCCCTATTTTGTATTGAAGAGGGATTCACATCTGCATCTTAACTGCTCTTTATGAATGAAAAAACAGT | |
| | CCTCTGTATGTACTCCTCTTTACACTGGCCAGGGTCAGAGTTAAATAGAGTATATGCACTTTCCAAATTG | |
| | GGGACAAGGGCTCTAAAAAAAGCCCCAAAAGGAGAAGAACATCTGAGAACCTCCTCGGCCCTCCCAGTCC | |
| | CTCGCTGCACAAATACTCCGCAAGAGAGGCCAGAATGACAGCTGACAGGGTCTATGGCCATCGGGTCGTC | |
| | TCCGAAGATTTGGCAGGGGCAGAAAACTCTGGCAGGCTTAAGATTTGGAATAAAGTCACAGAATTAAGGA | |
| | AGCACCTCAATTTAGTTCAAACAAGACGCCAACATTCTCTCCACAGCTCACTTACCTCTCTGTGTTCAGA | |
| | TGTGGCCTTCCATTTATATGTGATCTTTGTTTTATTAGTAAATGCTTATCATCTAAAGATGTAGCTCTGG | |
| | CCCAGTGGGAAAAATTAGGAAGTGATTATAAATCGAGAGGAGTTATAATAATCAAGATTAAATGTAAATA | |
| | ATCAGGGCAATCCCAACACATGTCTAGCTTTCACCTCCAGGATCTATTGAGTGAACAGAATTGCAAATAG | |
| | TCTCTATTTGTAATTGAACTTATCCTAAAACAAATAGTTTATAAATGTGAACTTAAACTCTAATTAATTC | |
| | CAACTGTACTTTTAAGGCAGTGGCTGTTTTTAGACTTTCTTATCACTTATAGTTAGTAATGTACACCTAC | |
| | TCTATCAGAGAAAAACAGGAAAGGCTCGAAATACAAGCCATTCTAAGGAAATTAGGGAGTCAGTTGAAAT | |
| | TCTATTCTGATCTTATTCTGTGGTGTCTTTTGCAGCCCAGACAAATGTGGTTACACACTTTTTAAGAAAT | |
| | ACAATTCTACATTGTCAAGCTTATGAAGGTTCCAATCAGATCTTTATTGTTATTCAATTTGGATCTTTCA | |
| | GGGATTTTTTTTTTAAATTATTATGGGACAAAGGACATTTGTTGGAGGGGTGGGAGGGAGGAAGAATTTT | |
| | TAAATGTAAAACATTCCCAAGTTTGGATCAGGGAGTTGGAAGTTTTCAGAATAACCAGAACTAAGGGTAT | |
| | GAAGGACCTGTATTGGGGTCGATGTGATGCCTCTGCGAAGAACCTTGTGTGACAAATGAGAAACATTTTG | |
| | AAGTTTGTGGTACGACCTTTAGATTCCAGAGACATCAGCATGGCTCAAAGTGCAGCTCCGTTTGGCAGTG | |
| | CAATGGTATAAATTTCAAGCTGGATATGTCTAATGGGTATTTAAACAATAAATGTGCAGTTTTAACTAAC | |
| | AGGATATTTAATGACAACCTTCTGGTTGGTAGGGACATCTGTTTCTAAATGTTTATTATGTACAATACAG | |
| | AAAAAAATTTTATAAAATTAAGCAATGTGAAACTGAATTGGAGAGTGATAATACAAGTCCTTTAGTCTTA | |
| | CCCAGTGAATCATTCTGTTCCATGTCTTTGGACAACCATGACCTTGGACAATCATGAAATATGCATCTCA | |
| | CTGGATGCAAAGAAAATCAGATGGAGCATGAATGGTACTGTACCGGTTCATCTGGACTGCCCCAGAAAAA | |
| | TAACTTCAAGCAAACATCCTATCAACAACAAGGTTGTTCTGCATACCAAGCTGAGCACAGAAGATGGGAA | |
| | CACTGGTGGAGGATGGAAAGGCTCGCTCAATCAAGAAAATTCTGAGACTATTAATAAATAAGACTGTAGT | |
| | GTAGATACTGAGTAAATCCATGCACCTAAACCTTTTGGAAAATCTGCCGTGGGCCCTCCAGATAGCTCAT | |
| | TTCATTAAGTTTTTCCCTCCAAGGTAGAATTTGCAAGAGTGACAGTGGATTGCATTTCTTTTGGGGAAGC | |
| | TTTCTTTTGGTGGTTTTGTTTATTATACCTTCTTAAGTTTTCAACCAAGGTTTGCTTTTGTTTTGAGTTA | |
| | CTGGGGTTATTTTTGTTTTAAATAAAAATAAGTGTACAATAAGTGTTTTTGTATTGAAAGCTTTTGTTAT | |
| | CAAGATTTTCATACTTTTACCTTCCATGGCTCTTTTTAAGATTGATACTTTTAAGAGGTGGCTGATATTC | |
| | TGCAACACTGTACACATAAAAAATACGGTAAGGATACTTTACATGGTTAAGGTAAAGTAAGTCTCCAGTT | |
| | GGCCACCATTAGCTATAATGGCACTTTGTTTGTGTTGTTGGAAAAAGTCACATTGCCATTAAACTTTCCT | |
| | TGTCTGTCTAGTTAATATTGTGAAGAAAAATAAAGTACAGTGTGAGATACTG | |
| ABCC3 | GCGGAGGCGGCTCCGGCGCCCGCTCTGCCCGCCGCTGGGTCCGACCGCGCTCGCCTTCCTTGCAGCCGCG | 176 |
| NM_003786.3 | CCTCGGCCCCATGGACGCCCTGTGCGGTTCCGGGGAGCTCGGCTCCAAGTTCTGGGACTCCAACCTGTCT | |
| | GTGCACACAGAAAACCCGGACCTCACTCCCTGCTTCCAGAACTCCCTGCTGGCCTGGGTGCCCTGCATCT | |
| | ACCTGTGGGTCGCCCTGCCCTGCTACTTGCTCTACCTGCGGCACCATTGTCGTGGCTACATCATCCTCTC | |
| | CCACCTGTCCAAGCTCAAGATGGTCCTGGGTGTCCTGCTGTGGTGCGTCTCCTGGGCGGACCTTTTTTAC | |
| | TCCTTCCATGGCCTGGTCCATGGCCGGGCCCCTGCCCCTGTTTTCTTTGTCACCCCCTTGGTGGTGGGGG | |
| | TCACCATGCTGCTGGCCACCCTGCTGATACAGTATGAGCGGCTGCAGGGCGTACAGTCTTCGGGGGTCCT | |
| | CATTATCTTCTGGTTCCTGTGTGTGGTCTGCGCCATCGTCCCATTCCGCTCCAAGATCCTTTTAGCCAAG | |
| | GCAGAGGGTGAGATCTCAGACCCCTTCCGCTTCACCACCTTCTACATCCACTTTGCCCTGGTACTCTCTG | |
| | CCCTCATCTTGGCCTGCTTCAGGGAGAAACCTCCATTTTTCTCCGCAAAGAATGTCGACCCTAACCCCTA | |
| | CCCTGAGACCAGCGCTGGCTTTCTCTCCCGCCTGTTTTTCTGGTGGTTCACAAAGATGGCCATCTATGGC | |
| | TACCGGCATCCCCTGGAGGAGAAGGACCTCTGGTCCCTAAAGGAAGAGGACAGATCCCAGATGGTGGTGC | |
| | AGCAGCTGCTGGAGGCATGGAGGAAGCAGGAAAAGCAGACGGCACGACACAAGGCTTCAGCAGCACCTGG | |
| | GAAAAATGCCTCCGGCGAGGACGAGGTGCTGCTGGGTGCCCGGCCCAGGCCCCGGAAGCCCTCCTTCCTG | |
| | AAGGCCCTGCTGGCCACCTTCGGCTCCAGCTTCCTCATCAGTGCCTGCTTCAAGCTTATCCAGGACCTGC | |
| | TCTCCTTCATCAATCCACAGCTGCTCAGCATCCTGATCAGGTTTATCTCCAACCCCATGGCCCCCTCCTG | |
| | GTGGGGCTTCCTGGTGGCTGGGCTGATGTTCCTGTGCTCCATGATGCAGTCGCTGATCTTACAACACTAT | |
| | TACCACTACATCTTTGTGACTGGGGTGAAGTTTCGTACTGGGATCATGGGTGTCATCTACAGGAAGGCTC | |
| | TGGTTATCACCAACTCAGTCAAACGTGCGTCCACTGTGGGGGAAATTGTCAACCTCATGTCAGTGGATGC | |
| | CCAGCGCTTCATGGACCTTGCCCCCTTCCTCAATCTGCTGTGGTCAGCACCCCTGCAGATCATCCTGGCG | |
| | ATCTACTTCCTCTGGCAGAACCTAGGTCCCTCTGTCCTGGCTGGAGTCGCTTTCATGGTCTTGCTGATTC | |
| | CACTCAACGGAGCTGTGGCCGTGAAGATGCGCGCCTTCCAGGTAAAGCAAATGAAATTGAAGGACTCGCG | |
| | CATCAAGCTGATGAGTGAGATCCTGAACGGCATCAAGGTGCTGAAGCTGTACGCCTGGGAGCCCAGCTTC | |
| | CTGAAGCAGGTGGAGGGCATCAGGCAGGGTGAGCTCCAGCTGCTGCGCACGGCGGCCTACCTCCACACCA | |
| | CAACCACCTTCACCTGGATGTGCAGCCCCTTCCTGGTGACCCTGATCACCCTCTGGGTGTACGTGTACGT | |
| | GGACCCAAACAATGTGCTGGACGCCGAGAAGGCCTTTGTGTCTGTGTCCTTGTTTAATATCTTAAGACTT | |
| | CCCCTCAACATGCTGCCCCAGTTAATCAGCAACCTGACTCAGGCCAGTGTGTCTCTGAAACGGATCCAGC | |
| | AATTCCTGAGCCAAGAGGAACTTGACCCCCAGAGTGTGGAAAGAAAGACCATCTCCCCAGGCTATGCCAT | |
| | CACCATACACAGTGGCACCTTCACCTGGGCCCAGGACCTGCCCCCCACTCTGCACAGCCTAGACATCCAG | |
| | GTCCCGAAAGGGGCACTGGTGGCCGTGGTGGGGCCTGTGGGCTGTGGGAAGTCCTCCCTGGTGTCTGCCC | |
| | TGCTGGGAGAGATGGAGAAGCTAGAAGGCAAAGTGCACATGAAGGGCTCCGTGGCCTATGTGCCCCAGCA | |
| | GGCATGGATCCAGAACTGCACTCTTCAGGAAAACGTGCTTTTCGGCAAAGCCCTGAACCCCAAGCGCTAC | |
| | CAGCAGACTCTGGAGGCCTGTGCCTTGCTAGCTGACCTGGAGATGCTGCCTGGTGGGGATCAGACAGAGA | |
| | TTGGAGAGAAGGGCATTAACCTGTCTGGGGGCCAGCGGCAGCGGGTCAGTCTGGCTCGAGCTGTTTACAG | |
| | TGATGCCGATATTTTCTTGCTGGATGACCCACTGTCCGCGGTGGACTCTCATGTGGCCAAGCACATCTTT | |
| | GACCACGTCATCGGGCCAGAAGGCGTGCTGGCAGGCAAGACGCGAGTGCTGGTGACGCACGGCATTAGCT | |
| | TCCTGCCCCAGACAGACTTCATCATTGTGCTAGCTGATGGACAGGTGTCTGAGATGGGCCCGTACCCAGC | |
| | CCTGCTGCAGCGCAACGGCTCCTTTGCCAACTTTCTCTGCAACTATGCCCCCGATGAGGACCAAGGGCAC | |
| | CTGGAGGACAGCTGGACCGCGTTGGAAGGTGCAGAGGATAAGGAGGCACTGCTGATTGAAGACACACTCA | |
| | GCAACCACACGGATCTGACAGACAATGATCCAGTCACCTATGTGGTCCAGAAGCAGTTTATGAGACAGCT | |
| | GAGTGCCCTGTCCTCAGATGGGGAGGGACAGGGTCGGCCTGTACCCCGGAGGCACCTGGGTCCATCAGAG | |
| | AAGGTGCAGGTGACAGAGGCGAAGGCAGATGGGGCACTGACCCAGGAGGAGAAAGCAGCCATTGGCACTG | |
| | TGGAGCTCAGTGTGTTCTGGGATTATGCCAAGGCCGTGGGGCTCTGTACCACGCTGGCCATCTGTCTCCT | |
| | GTATGTGGGTCAAAGTGCGGCTGCCATTGGAGCCAATGTGTGGCTCAGTGCCTGGACAAATGATGCCATG | |
| | GCAGACAGTAGACAGAACAACACTTCCCTGAGGCTGGGCGTCTATGCTGCTTTAGGAATTCTGCAAGGGT | |
| | TCTTGGTGATGCTGGCAGCCATGGCCATGGCAGCGGGTGGCATCCAGGCTGCCCGTGTGTTGCACCAGGC | |
| | ACTGCTGCACAACAAGATACGCTCGCCACAGTCCTTCTTTGACACCACACCATCAGGCCGCATCCTGAAC | |
| | TGCTTCTCCAAGGACATCTATGTCGTTGATGAGGTTCTGGCCCCTGTCATCCTCATGCTGCTCAATTCCT | |
| | TCTTCAACGCCATCTCCACTCTTGTGGTCATCATGGCCAGCACGCCGCTCTTCACTGTGGTCATCCTGCC | |
| | CCTGGCTGTGCTCTACACCTTAGTGCAGCGCTTCTATGCAGCCACATCACGGCAACTGAAGCGGCTGGAA | |
| | TCAGTCAGCCGCTCACCTATCTACTCCCACTTTTCGGAGACAGTGACTGGTGCCAGTGTCATCCGGGCCT | |
| | ACAACCGCAGCCGGGATTTTGAGATCATCAGTGATACTAAGGTGGATGCCAACCAGAGAAGCTGCTACCC | |
| | CTACATCATCTCCAACCGGTGGCTGAGCATCGGAGTGGAGTTCGTGGGGAACTGCGTGGTGCTCTTTGCT | |
| | GCACTATTTGCCGTCATCGGGAGGAGCAGCCTGAACCCGGGGCTGGTGGGCCTTTCTGTGTCCTACTCCT | |
| | TGCAGGTGACATTTGCTCTGAACTGGATGATACGAATGATGTCAGATTTGGAATCTAACATCGTGGCTGT | |
| | GGAGAGGGTCAAGGAGTACTCCAAGACAGAGACAGAGGCGCCCTGGGTGGTGGAAGGCAGCCGCCCTCCC | |
| | GAAGGTTGGCCCCCACGTGGGGAGGTGGAGTTCCGGAATTATTCTGTGCGCTACCGGCCGGGCCTAGACC | |
| | TGGTGCTGAGAGACCTGAGTCTGCATGTGCACGGTGGCGAGAAGGTGGGGATCGTGGGCCGCACTGGGGC | |
| | TGGCAAGTCTTCCATGACCCTTTGCCTGTTCCGCATCCTGGAGGCGGCAAAGGGTGAAATCCGCATTGAT | |
| | GGCCTCAATGTGGCAGACATCGGCCTCCATGACCTGCGCTCTCAGCTGACCATCATCCCGCAGGACCCCA | |
| | TCCTGTTCTCGGGGACCCTGCGCATGAACCTGGACCCCTTCGGCAGCTACTCAGAGGAGGACATTTGGTG | |
| | GGCTTTGGAGCTGTCCCACCTGCACACGTTTGTGAGCTCCCAGCCGGCAGGCCTGGACTTCCAGTGCTCA | |
| | GAGGGCGGGGAGAATCTCAGCGTGGGCCAGAGGCAGCTCGTGTGCCTGGCCCGAGCCCTGCTCCGCAAGA | |
| | GCCGCATCCTGGTTTTAGACGAGGCCACAGCTGCCATCGACCTGGAGACTGACAACCTCATCCAGGCTAC | |
| | CATCCGCACCCAGTTTGATACCTGCACTGTCCTGACCATCGCACACCGGCTTAACACTATCATGGACTAC | |
| | ACCAGGGTCCTGGTCCTGGACAAAGGAGTAGTAGCTGAATTTGATTCTCCAGCCAACCTCATTGCAGCTA | |
| | GAGGCATCTTCTACGGGATGGCCAGAGATGCTGGACTTGCCTAAAATATATTCCTGAGATTTCCTCCTGG | |
| | CCTTTCCTGGTTTTCATCAGGAAGGAAATGACACCAAATATGTCCGCAGAATGGACTTGATAGCAAACAC | |
| | TGGGGGCACCTTAAGATTTTGCACCTGTAAAGTGCCTTACAGGGTAACTGTGCTGAATGCTTTAGATGAG | |
| | GAAATGATCCCCAAGTGGTGAATGACACGCCTAAGGTCACAGCTAGTTTGAGCCAGTTAGACTAGTCCCC | |
| | GGTCTCCCGATTCCCAACTGAGTGTTATTTGCACACTGCACTGTTTTCAAATAACGATTTTATGAAATGA | |
| | CCTCTGTCCTCCCTCTGATTTTTCATATTTTCTAAAGTTTCGTTTCTGTTTTTTAATAAAAAGCTTTTTC | |
| | CTCCTGGAACAGAAGACAGCTGCTGGGTCAGGCCACCCCTAGGAACTCAGTCCTGTACTCTGGGGTGCTG | |
| | CCTGAATCCATTAAAAATGGGAGTACTGATGAAATAAAACTACATGGTCAACAGTAAAAAAAAAAAAAAA | |
| | AAA | |
| CCND1 | CACACGGACTACAGGGGAGTTTTGTTGAAGTTGCAAAGTCCTGGAGCCTCCAGAGGGCTGTCGGCGCAGT | 177 |
| NM_053056.2 | AGCAGCGAGCAGCAGAGTCCGCACGCTCCGGCGAGGGGCAGAAGAGCGCGAGGGAGCGCGGGGCAGCAGA | |
| | AGCGAGAGCCGAGCGCGGACCCAGCCAGGACCCACAGCCCTCCCCAGCTGCCCAGGAAGAGCCCCAGCCA | |
| | TGGAACACCAGCTCCTGTGCTGCGAAGTGGAAACCATCCGCCGCGCGTACCCCGATGCCAACCTCCTCAA | |
| | CGACCGGGTGCTGCGGGCCATGCTGAAGGCGGAGGAGACCTGCGCGCCCTCGGTGTCCTACTTCAAATGT | |
| | GTGCAGAAGGAGGTCCTGCCGTCCATGCGGAAGATCGTCGCCACCTGGATGCTGGAGGTCTGCGAGGAAC | |
| | AGAAGTGCGAGGAGGAGGTCTTCCCGCTGGCCATGAACTACCTGGACCGCTTCCTGTCGCTGGAGCCCGT | |
| | GAAAAAGAGCCGCCTGCAGCTGCTGGGGGCCACTTGCATGTTCGTGGCCTCTAAGATGAAGGAGACCATC | |
| | CCCCTGACGGCCGAGAAGCTGTGCATCTACACCGACAACTCCATCCGGCCCGAGGAGCTGCTGCAAATGG | |
| | AGCTGCTCCTGGTGAACAAGCTCAAGTGGAACCTGGCCGCAATGACCCCGCACGATTTCATTGAACACTT | |
| | CCTCTCCAAAATGCCAGAGGCGGAGGAGAACAAACAGATCATCCGCAAACACGCGCAGACCTTCGTTGCC | |
| | CTCTGTGCCACAGATGTGAAGTTCATTTCCAATCCGCCCTCCATGGTGGCAGCGGGGAGCGTGGTGGCCG | |
| | CAGTGCAAGGCCTGAACCTGAGGAGCCCCAACAACTTCCTGTCCTACTACCGCCTCACACGCTTCCTCTC | |
| | CAGAGTGATCAAGTGTGACCCGGACTGCCTCCGGGCCTGCCAGGAGCAGATCGAAGCCCTGCTGGAGTCA | |
| | AGCCTGCGCCAGGCCCAGCAGAACATGGACCCCAAGGCCGCCGAGGAGGAGGAAGAGGAGGAGGAGGAGG | |
| | TGGACCTGGCTTGCACACCCACCGACGTGCGGGACGTGGACATCTGAGGGCGCCAGGCAGGCGGGCGCCA | |
| | CCGCCACCCGCAGCGAGGGCGGAGCCGGCCCCAGGTGCTCCCCTGACAGTCCCTCCTCTCCGGAGCATTT | |
| | TGATACCAGAAGGGAAAGCTTCATTCTCCTTGTTGTTGGTTGTTTTTTCCTTTGCTCTTTCCCCCTTCCA | |
| | TCTCTGACTTAAGCAAAAGAAAAAGATTACCCAAAAACTGTCTTTAAAAGAGAGAGAGAGAAAAAAAAAA | |
| | TAGTATTTGCATAACCCTGAGCGGTGGGGGAGGAGGGTTGTGCTACAGATGATAGAGGATTTTATACCCC | |
| | AATAATCAACTCGTTTTTATATTAATGTACTTGTTTCTCTGTTGTAAGAATAGGCATTAACACAAAGGAG | |
| | GCGTCTCGGGAGAGGATTAGGTTCCATCCTTTACGTGTTTAAAAAAAAGCATAAAAACATTTTAAAAACA | |
| | TAGAAAAATTCAGCAAACCATTTTTAAAGTAGAAGAGGGTTTTAGGTAGAAAAACATATTCTTGTGCTTT | |
| | TCCTGATAAAGCACAGCTGTAGTGGGGTTCTAGGCATCTCTGTACTTTGCTTGCTCATATGCATGTAGTC | |
| | ACTTTATAAGTCATTGTATGTTATTATATTCCGTAGGTAGATGTGTAACCTCTTCACCTTATTCATGGCT | |
| | GAAGTCACCTCTTGGTTACAGTAGCGTAGCGTGCCCGTGTGCATGTCCTTTGCGCCTGTGACCACCACCC | |
| | CAACAAACCATCCAGTGACAAACCATCCAGTGGAGGTTTGTCGGGCACCAGCCAGCGTAGCAGGGTCGGG | |
| | AAAGGCCACCTGTCCCACTCCTACGATACGCTACTATAAAGAGAAGACGAAATAGTGACATAATATATTC | |
| | TATTTTTATACTCTTCCTATTTTTGTAGTGACCTGTTTATGAGATGCTGGTTTTCTACCCAACGGCCCTG | |
| | CAGCCAGCTCACGTCCAGGTTCAACCCACAGCTACTTGGTTTGTGTTCTTCTTCATATTCTAAAACCATT | |
| | CCATTTCCAAGCACTTTCAGTCCAATAGGTGTAGGAAATAGCGCTGTTTTTGTTGTGTGTGCAGGGAGGG | |
| | CAGTTTTCTAATGGAATGGTTTGGGAATATCCATGTACTTGTTTGCAAGCAGGACTTTGAGGCAAGTGTG | |
| | GGCCACTGTGGTGGCAGTGGAGGTGGGGTGTTTGGGAGGCTGCGTGCCAGTCAAGAAGAAAAAGGTTTGC | |
| | ATTCTCACATTGCCAGGATGATAAGTTCCTTTCCTTTTCTTTAAAGAAGTTGAAGTTTAGGAATCCTTTG | |
| | GTGCCAACTGGTGTTTGAAAGTAGGGACCTCAGAGGTTTACCTAGAGAACAGGTGGTTTTTAAGGGTTAT | |
| | CTTAGATGTTTCACACCGGAAGGTTTTTAAACACTAAAATATATAATTTATAGTTAAGGCTAAAAAGTAT | |
| | ATTTATTGCAGAGGATGTTCATAAGGCCAGTATGATTTATAAATGCAATCTCCCCTTGATTTAAACACAC | |
| | AGATACACACACACACACACACACACACAAACCTTCTGCCTTTGATGTTACAGATTTAATACAGTTTATT | |
| | TTTAAAGATAGATCCTTTTATAGGTGAGAAAAAAACAATCTGGAAGAAAAAAACCACACAAAGACATTGA | |
| | TTCAGCCTGTTTGGCGTTTCCCAGAGTCATCTGATTGGACAGGCATGGGTGCAAGGAAAATTAGGGTACT | |
| | CAACCTAAGTTCGGTTCCGATGAATTCTTATCCCCTGCCCCTTCCTTTAAAAAACTTAGTGACAAAATAG | |
| | ACAATTTGCACATCTTGGCTATGTAATTCTTGTAATTTTTATTTAGGAAGTGTTGAAGGGAGGTGGCAAG | |
| | AGTGTGGAGGCTGACGTGTGAGGGAGGACAGGCGGGAGGAGGTGTGAGGAGGAGGCTCCCGAGGGGAAGG | |
| | GGCGGTGCCCACACCGGGGACAGGCCGCAGCTCCATTTTCTTATTGCGCTGCTACCGTTGACTTCCAGGC | |
| | ACGGTTTGGAAATATTCACATCGCTTCTGTGTATCTCTTTCACATTGTTTGCTGCTATTGGAGGATCAGT | |
| | TTTTTGTTTTACAATGTCATATACTGCCATGTACTAGTTTTAGTTTTCTCTTAGAACATTGTATTACAGA | |
| | TGCCTTTTTTGTAGTTTTTTTTTTTTTTATGTGATCAATTTTGACTTAATGTGATTACTGCTCTATTCCA | |
| | AAAAGGTTGCTGTTTCACAATACCTCATGCTTCACTTAGCCATGGTGGACCCAGCGGGCAGGTTCTGCCT | |
| | GCTTTGGCGGGCAGACACGCGGGCGCGATCCCACACAGGCTGGCGGGGGCCGGCCCCGAGGCCGCGTGCG | |
| | TGAGAACCGCGCCGGTGTCCCCAGAGACCAGGCTGTGTCCCTCTTCTCTTCCCTGCGCCTGTGATGCTGG | |
| | GCACTTCATCTGATCGGGGGCGTAGCATCATAGTAGTTTTTACAGCTGTGTTATTCTTTGCGTGTAGCTA | |
| | TGGAAGTTGCATAATTATTATTATTATTATTATAACAAGTGTGTCTTACGTGCCACCACGGCGTTGTACC | |
| | TGTAGGACTCTCATTCGGGATGATTGGAATAGCTTCTGGAATTTGTTCAAGTTTTGGGTATGTTTAATCT | |
| | GTTATGTACTAGTGTTCTGTTTGTTATTGTTTTGTTAATTACACCATAATGCTAATTTAAAGAGACTCCA | |
| | AATCTCAATGAAGCCAGCTCACAGTGCTGTGTGCCCCGGTCACCTAGCAAGCTGCCGAACCAAAAGAATT | |
| | TGCACCCCGCTGCGGGCCCACGTGGTTGGGGCCCTGCCCTGGCAGGGTCATCCTGTGCTCGGAGGCCATC | |
| | TCGGGCACAGGCCCACCCCGCCCCACCCCTCCAGAACACGGCTCACGCTTACCTCAACCATCCTGGCTGC | |
| | GGCGTCTGTCTGAACCACGCGGGGGCCTTGAGGGACGCTTTGTCTGTCGTGATGGGGCAAGGGCACAAGT | |
| | CCTGGATGTTGTGTGTATCGAGAGGCCAAAGGCTGGTGGCAAGTGCACGGGGCACAGCGGAGTCTGTCCT | |
| | GTGACGCGCAAGTCTGAGGGTCTGGGCGGCGGGCGGCTGGGTCTGTGCATTTCTGGTTGCACCGCGGCGC | |
| | TTCCCAGCACCAACATGTAACCGGCATGTTTCCAGCAGAAGACAAAAAGACAAACATGAAAGTCTAGAAA | |
| | TAAAACTGGTAAAACCCCAAAAAAAAAAAAAAAA | |
| CCNE1 | AGCAGCCGGCGCGGCCGCCAGCGCGGTGTAGGGGGCAGGCGCGGATCCCGCCACCGCCGCGCGCTCGGCC | 178 |
| NM_001238.2 | CGCCGACTCCCGGCGCCGCCGCCGCCACTGCCGTCGCCGCCGCCGCCTGCCGGGACTGGAGCGCGCCGTC | |
| | CGCCGCGGACAAGACCCTGGCCTCAGGCCGGAGCAGCCCCATCATGCCGAGGGAGCGCAGGGAGCGGGAT | |
| | GCGAAGGAGCGGGACACCATGAAGGAGGACGGCGGCGCGGAGTTCTCGGCTCGCTCCAGGAAGAGGAAGG | |
| | CAAACGTGACCGTTTTTTTGCAGGATCCAGATGAAGAAATGGCCAAAATCGACAGGACGGCGAGGGACCA | |
| | GTGTGGGAGCCAGCCTTGGGACAATAATGCAGTCTGTGCAGACCCCTGCTCCCTGATCCCCACACCTGAC | |
| | AAAGAAGATGATGACCGGGTTTACCCAAACTCAACGTGCAAGCCTCGGATTATTGCACCATCCAGAGGCT | |
| | CCCCGCTGCCTGTACTGAGCTGGGCAAATAGAGAGGAAGTCTGGAAAATCATGTTAAACAAGGAAAAGAC | |
| | ATACTTAAGGGATCAGCACTTTCTTGAGCAACACCCTCTTCTGCAGCCAAAAATGCGAGCAATTCTTCTG | |
| | GATTGGTTAATGGAGGTGTGTGAAGTCTATAAACTTCACAGGGAGACCTTTTACTTGGCACAAGATTTCT | |
| | TTGACCGGTATATGGCGACACAAGAAAATGTTGTAAAAACTCTTTTACAGCTTATTGGGATTTCATCTTT | |
| | ATTTATTGCAGCCAAACTTGAGGAAATCTATCCTCCAAAGTTGCACCAGTTTGCGTATGTGACAGATGGA | |
| | GCTTGTTCAGGAGATGAAATTCTCACCATGGAATTAATGATTATGAAGGCCCTTAAGTGGCGTTTAAGTC | |
| | CCCTGACTATTGTGTCCTGGCTGAATGTATACATGCAGGTTGCATATCTAAATGACTTACATGAAGTGCT | |
| | ACTGCCGCAGTATCCCCAGCAAATCTTTATACAGATTGCAGAGCTGTTGGATCTCTGTGTCCTGGATGTT | |
| | GACTGCCTTGAATTTCCTTATGGTATACTTGCTGCTTCGGCCTTGTATCATTTCTCGTCATCTGAATTGA | |
| | TGCAAAAGGTTTCAGGGTATCAGTGGTGCGACATAGAGAACTGTGTCAAGTGGATGGTTCCATTTGCCAT | |
| | GGTTATAAGGGAGACGGGGAGCTCAAAACTGAAGCACTTCAGGGGCGTCGCTGATGAAGATGCACACAAC | |
| | ATACAGACCCACAGAGACAGCTTGGATTTGCTGGACAAAGCCCGAGCAAAGAAAGCCATGTTGTCTGAAC | |
| | AAAATAGGGCTTCTCCTCTCCCCAGTGGGCTCCTCACCCCGCCACAGAGCGGTAAGAAGCAGAGCAGCGG | |
| | GCCGGAAATGGCGTGACCACCCCATCCTTCTCCACCAAAGACAGTTGCGCGCCTGCTCCACGTTCTCTTC | |
| | TGTCTGTTGCAGCGGAGGCGTGCGTTTGCTTTTACAGATATCTGAATGGAAGAGTGTTTCTTCCACAACA | |
| | GAAGTATTTCTGTGGATGGCATCAAACAGGGCAAAGTGTTTTTTATTGAATGCTTATAGGTTTTTTTTAA | |
| | ATAAGTGGGTCAAGTACACCAGCCACCTCCAGACACCAGTGCGTGCTCCCGATGCTGCTATGGAAGGTGC | |
| | TACTTGACCTAAGGGACTCCCACAACAACAAAAGCTTGAAGCTGTGGAGGGCCACGGTGGCGTGGCTCTC | |
| | CTCGCAGGTGTTCTGGGCTCCGTTGTACCAAGTGGAGCAGGTGGTTGCGGGCAAGCGTTGTGCAGAGCCC | |
| | ATAGCCAGCTGGGCAGGGGGCTGCCCTCTCCACATTATCAGTTGACAGTGTACAATGCCTTTGATGAACT | |
| | GTTTTGTAAGTGCTGCTATATCTATCCATTTTTTAATAAAGATAATACTGTTTTTGAAAAAAAAAAAAAA | |
| | AAAAAAAAAAAAAAAAAAAAAAAAAAAAAAAAAAAAAAAAAAAAAAAAAAAAAAAAAAAAA | |
| CDH1 | AGTGGCGTCGGAACTGCAAAGCACCTGTGAGCTTGCGGAAGTCAGTTCAGACTCCAGCCCGCTCCAGCCC | 179 |
| NM_004360.3 | GGCCCGACCCGACCGCACCCGGCGCCTGCCCTCGCTCGGCGTCCCCGGCCAGCCATGGGCCCTTGGAGCC | |
| | GCAGCCTCTCGGCGCTGCTGCTGCTGCTGCAGGTCTCCTCTTGGCTCTGCCAGGAGCCGGAGCCCTGCCA | |
| | CCCTGGCTTTGACGCCGAGAGCTACACGTTCACGGTGCCCCGGCGCCACCTGGAGAGAGGCCGCGTCCTG | |
| | GGCAGAGTGAATTTTGAAGATTGCACCGGTCGACAAAGGACAGCCTATTTTTCCCTCGACACCCGATTCA | |
| | AAGTGGGCACAGATGGTGTGATTACAGTCAAAAGGCCTCTACGGTTTCATAACCCACAGATCCATTTCTT | |
| | GGTCTACGCCTGGGACTCCACCTACAGAAAGTTTTCCACCAAAGTCACGCTGAATACAGTGGGGCACCAC | |
| | CACCGCCCCCCGCCCCATCAGGCCTCCGTTTCTGGAATCCAAGCAGAATTGCTCACATTTCCCAACTCCT | |
| | CTCCTGGCCTCAGAAGACAGAAGAGAGACTGGGTTATTCCTCCCATCAGCTGCCCAGAAAATGAAAAAGG | |
| | CCCATTTCCTAAAAACCTGGTTCAGATCAAATCCAACAAAGACAAAGAAGGCAAGGTTTTCTACAGCATC | |
| | ACTGGCCAAGGAGCTGACACACCCCCTGTTGGTGTCTTTATTATTGAAAGAGAAACAGGATGGCTGAAGG | |
| | TGACAGAGCCTCTGGATAGAGAACGCATTGCCACATACACTCTCTTCTCTCACGCTGTGTCATCCAACGG | |
| | GAATGCAGTTGAGGATCCAATGGAGATTTTGATCACGGTAACCGATCAGAATGACAACAAGCCCGAATTC | |
| | ACCCAGGAGGTCTTTAAGGGGTCTGTCATGGAAGGTGCTCTTCCAGGAACCTCTGTGATGGAGGTCACAG | |
| | CCACAGACGCGGACGATGATGTGAACACCTACAATGCCGCCATCGCTTACACCATCCTCAGCCAAGATCC | |
| | TGAGCTCCCTGACAAAAATATGTTCACCATTAACAGGAACACAGGAGTCATCAGTGTGGTCACCACTGGG | |
| | CTGGACCGAGAGAGTTTCCCTACGTATACCCTGGTGGTTCAAGCTGCTGACCTTCAAGGTGAGGGGTTAA | |
| | GCACAACAGCAACAGCTGTGATCACAGTCACTGACACCAACGATAATCCTCCGATCTTCAATCCCACCAC | |
| | GTACAAGGGTCAGGTGCCTGAGAACGAGGCTAACGTCGTAATCACCACACTGAAAGTGACTGATGCTGAT | |
| | GCCCCCAATACCCCAGCGTGGGAGGCTGTATACACCATATTGAATGATGATGGTGGACAATTTGTCGTCA | |
| | CCACAAATCCAGTGAACAACGATGGCATTTTGAAAACAGCAAAGGGCTTGGATTTTGAGGCCAAGCAGCA | |
| | GTACATTCTACACGTAGCAGTGACGAATGTGGTACCTTTTGAGGTCTCTCTCACCACCTCCACAGCCACC | |
| | GTCACCGTGGATGTGCTGGATGTGAATGAAGCCCCCATCTTTGTGCCTCCTGAAAAGAGAGTGGAAGTGT | |
| | CCGAGGACTTTGGCGTGGGCCAGGAAATCACATCCTACACTGCCCAGGAGCCAGACACATTTATGGAACA | |
| | GAAAATAACATATCGGATTTGGAGAGACACTGCCAACTGGCTGGAGATTAATCCGGACACTGGTGCCATT | |
| | TCCACTCGGGCTGAGCTGGACAGGGAGGATTTTGAGCACGTGAAGAACAGCACGTACACAGCCCTAATCA | |
| | TAGCTACAGACAATGGTTCTCCAGTTGCTACTGGAACAGGGACACTTCTGCTGATCCTGTCTGATGTGAA | |
| | TGACAACGCCCCCATACCAGAACCTCGAACTATATTCTTCTGTGAGAGGAATCCAAAGCCTCAGGTCATA | |
| | AACATCATTGATGCAGACCTTCCTCCCAATACATCTCCCTTCACAGCAGAACTAACACACGGGGCGAGTG | |
| | CCAACTGGACCATTCAGTACAACGACCCAACCCAAGAATCTATCATTTTGAAGCCAAAGATGGCCTTAGA | |
| | GGTGGGTGACTACAAAATCAATCTCAAGCTCATGGATAACCAGAATAAAGACCAAGTGACCACCTTAGAG | |
| | GTCAGCGTGTGTGACTGTGAAGGGGCCGCTGGCGTCTGTAGGAAGGCACAGCCTGTCGAAGCAGGATTGC | |
| | AAATTCCTGCCATTCTGGGGATTCTTGGAGGAATTCTTGCTTTGCTAATTCTGATTCTGCTGCTCTTGCT | |
| | GTTTCTTCGGAGGAGAGCGGTGGTCAAAGAGCCCTTACTGCCCCCAGAGGATGACACCCGGGACAACGTT | |
| | TATTACTATGATGAAGAAGGAGGCGGAGAAGAGGACCAGGACTTTGACTTGAGCCAGCTGCACAGGGGCC | |
| | TGGACGCTCGGCCTGAAGTGACTCGTAACGACGTTGCACCAACCCTCATGAGTGTCCCCCGGTATCTTCC | |
| | CCGCCCTGCCAATCCCGATGAAATTGGAAATTTTATTGATGAAAATCTGAAAGCGGCTGATACTGACCCC | |
| | ACAGCCCCGCCTTATGATTCTCTGCTCGTGTTTGACTATGAAGGAAGCGGTTCCGAAGCTGCTAGTCTGA | |
| | GCTCCCTGAACTCCTCAGAGTCAGACAAAGACCAGGACTATGACTACTTGAACGAATGGGGCAATCGCTT | |
| | CAAGAAGCTGGCTGACATGTACGGAGGCGGCGAGGACGACTAGGGGACTCGAGAGAGGCGGGCCCCAGAC | |
| | CCATGTGCTGGGAAATGCAGAAATCACGTTGCTGGTGGTTTTTCAGCTCCCTTCCCTTGAGATGAGTTTC | |
| | TGGGGAAAAAAAAGAGACTGGTTAGTGATGCAGTTAGTATAGCTTTATACTCTCTCCACTTTATAGCTCT | |
| | AATAAGTTTGTGTTAGAAAAGTTTCGACTTATTTCTTAAAGCTTTTTTTTTTTTCCCATCACTCTTTACA | |
| | TGGTGGTGATGTCCAAAAGATACCCAAATTTTAATATTCCAGAAGAACAACTTTAGCATCAGAAGGTTCA | |
| | CCCAGCACCTTGCAGATTTTCTTAAGGAATTTTGTCTCACTTTTAAAAAGAAGGGGAGAAGTCAGCTACT | |
| | CTAGTTCTGTTGTTTTGTGTATATAATTTTTTAAAAAAAATTTGTGTGCTTCTGCTCATTACTACACTGG | |
| | TGTGTCCCTCTGCCTTTTTTTTTTTTTTAAGACAGGGTCTCATTCTATCGGCCAGGCTGGAGTGCAGTGG | |
| | TGCAATCACAGCTCACTGCAGCCTTGTCCTCCCAGGCTCAAGCTATCCTTGCACCTCAGCCTCCCAAGTA | |
| | GCTGGGACCACAGGCATGCACCACTACGCATGACTAATTTTTTAAATATTTGAGACGGGGTCTCCCTGTG | |
| | TTACCCAGGCTGGTCTCAAACTCCTGGGCTCAAGTGATCCTCCCATCTTGGCCTCCCAGAGTATTGGGAT | |
| | TACAGACATGAGCCACTGCACCTGCCCAGCTCCCCAACTCCCTGCCATTTTTTAAGAGACAGTTTCGCTC | |
| | CATCGCCCAGGCCTGGGATGCAGTGATGTGATCATAGCTCACTGTAACCTCAAACTCTGGGGCTCAAGCA | |
| | GTTCTCCCACCAGCCTCCTTTTTATTTTTTTGTACAGATGGGGTCTTGCTATGTTGCCCAAGCTGGTCTT | |
| | AAACTCCTGGCCTCAAGCAATCCTTCTGCCTTGGCCCCCCAAAGTGCTGGGATTGTGGGCATGAGCTGCT | |
| | GTGCCCAGCCTCCATGTTTTAATATCAACTCTCACTCCTGAATTCAGTTGCTTTGCCCAAGATAGGAGTT | |
| | CTCTGATGCAGAAATTATTGGGCTCTTTTAGGGTAAGAAGTTTGTGTCTTTGTCTGGCCACATCTTGACT | |
| | AGGTATTGTCTACTCTGAAGACCTTTAATGGCTTCCCTCTTTCATCTCCTGAGTATGTAACTTGCAATGG | |
| | GCAGCTATCCAGTGACTTGTTCTGAGTAAGTGTGTTCATTAATGTTTATTTAGCTCTGAAGCAAGAGTGA | |
| | TATACTCCAGGACTTAGAATAGTGCCTAAAGTGCTGCAGCCAAAGACAGAGCGGAACTATGAAAAGTGGG | |
| | CTTGGAGATGGCAGGAGAGCTTGTCATTGAGCCTGGCAATTTAGCAAACTGATGCTGAGGATGATTGAGG | |
| | TGGGTCTACCTCATCTCTGAAAATTCTGGAAGGAATGGAGGAGTCTCAACATGTGTTTCTGACACAAGAT | |
| | CCGTGGTTTGTACTCAAAGCCCAGAATCCCCAAGTGCCTGCTTTTGATGATGTCTACAGAAAATGCTGGC | |
| | TGAGCTGAACACATTTGCCCAATTCCAGGTGTGCACAGAAAACCGAGAATATTCAAAATTCCAAATTTTT | |
| | TTCTTAGGAGCAAGAAGAAAATGTGGCCCTAAAGGGGGTTAGTTGAGGGGTAGGGGGTAGTGAGGATCTT | |
| | GATTTGGATCTCTTTTTATTTAAATGTGAATTTCAACTTTTGACAATCAAAGAAAAGACTTTTGTTGAAA | |
| | TAGCTTTACTGTTTCTCAAGTGTTTTGGAGAAAAAAATCAACCCTGCAATCACTTTTTGGAATTGTCTTG | |
| | ATTTTTCGGCAGTTCAAGCTATATCGAATATAGTTCTGTGTAGAGAATGTCACTGTAGTTTTGAGTGTAT | |
| | ACATGTGTGGGTGCTGATAATTGTGTATTTTCTTTGGGGGTGGAAAAGGAAAACAATTCAAGCTGAGAAA | |
| | AGTATTCTCAAAGATGCATTTTTATAAATTTTATTAAACAATTTTGTTAAACCAT | |
| EGFR | CCCCGGCGCAGCGCGGCCGCAGCAGCCTCCGCCCCCCGCACGGTGTGAGCGCCCGACGCGGCCGAGGCGG | 180 |
| NM_005228.3 | CCGGAGTCCCGAGCTAGCCCCGGCGGCCGCCGCCGCCCAGACCGGACGACAGGCCACCTCGTCGGCGTCC | |
| | GCCCGAGTCCCCGCCTCGCCGCCAACGCCACAACCACCGCGCACGGCCCCCTGACTCCGTCCAGTATTGA | |
| | TCGGGAGAGCCGGAGCGAGCTCTTCGGGGAGCAGCGATGCGACCCTCCGGGACGGCCGGGGCAGCGCTCC | |
| | TGGCGCTGCTGGCTGCGCTCTGCCCGGCGAGTCGGGCTCTGGAGGAAAAGAAAGTTTGCCAAGGCACGAG | |
| | TAACAAGCTCACGCAGTTGGGCACTTTTGAAGATCATTTTCTCAGCCTCCAGAGGATGTTCAATAACTGT | |
| | GAGGTGGTCCTTGGGAATTTGGAAATTACCTATGTGCAGAGGAATTATGATCTTTCCTTCTTAAAGACCA | |
| | TCCAGGAGGTGGCTGGTTATGTCCTCATTGCCCTCAACACAGTGGAGCGAATTCCTTTGGAAAACCTGCA | |
| | GATCATCAGAGGAAATATGTACTACGAAAATTCCTATGCCTTAGCAGTCTTATCTAACTATGATGCAAAT | |
| | AAAACCGGACTGAAGGAGCTGCCCATGAGAAATTTACAGGAAATCCTGCATGGCGCCGTGCGGTTCAGCA | |
| | ACAACCCTGCCCTGTGCAACGTGGAGAGCATCCAGTGGCGGGACATAGTCAGCAGTGACTTTCTCAGCAA | |
| | CATGTCGATGGACTTCCAGAACCACCTGGGCAGCTGCCAAAAGTGTGATCCAAGCTGTCCCAATGGGAGC | |
| | TGCTGGGGTGCAGGAGAGGAGAACTGCCAGAAACTGACCAAAATCATCTGTGCCCAGCAGTGCTCCGGGC | |
| | GCTGCCGTGGCAAGTCCCCCAGTGACTGCTGCCACAACCAGTGTGCTGCAGGCTGCACAGGCCCCCGGGA | |
| | GAGCGACTGCCTGGTCTGCCGCAAATTCCGAGACGAAGCCACGTGCAAGGACACCTGCCCCCCACTCATG | |
| | CTCTACAACCCCACCACGTACCAGATGGATGTGAACCCCGAGGGCAAATACAGCTTTGGTGCCACCTGCG | |
| | TGAAGAAGTGTCCCCGTAATTATGTGGTGACAGATCACGGCTCGTGCGTCCGAGCCTGTGGGGCCGACAG | |
| | CTATGAGATGGAGGAAGACGGCGTCCGCAAGTGTAAGAAGTGCGAAGGGCCTTGCCGCAAAGTGTGTAAC | |
| | GGAATAGGTATTGGTGAATTTAAAGACTCACTCTCCATAAATGCTACGAATATTAAACACTTCAAAAACT | |
| | GCACCTCCATCAGTGGCGATCTCCACATCCTGCCGGTGGCATTTAGGGGTGACTCCTTCACACATACTCC | |
| | TCCTCTGGATCCACAGGAACTGGATATTCTGAAAACCGTAAAGGAAATCACAGGGTTTTTGCTGATTCAG | |
| | GCTTGGCCTGAAAACAGGACGGACCTCCATGCCTTTGAGAACCTAGAAATCATACGCGGCAGGACCAAGC | |
| | AACATGGTCAGTTTTCTCTTGCAGTCGTCAGCCTGAACATAACATCCTTGGGATTACGCTCCCTCAAGGA | |
| | GATAAGTGATGGAGATGTGATAATTTCAGGAAACAAAAATTTGTGCTATGCAAATACAATAAACTGGAAA | |
| | AAACTGTTTGGGACCTCCGGTCAGAAAACCAAAATTATAAGCAACAGAGGTGAAAACAGCTGCAAGGCCA | |
| | CAGGCCAGGTCTGCCATGCCTTGTGCTCCCCCGAGGGCTGCTGGGGCCCGGAGCCCAGGGACTGCGTCTC | |
| | TTGCCGGAATGTCAGCCGAGGCAGGGAATGCGTGGACAAGTGCAACCTTCTGGAGGGTGAGCCAAGGGAG | |
| | TTTGTGGAGAACTCTGAGTGCATACAGTGCCACCCAGAGTGCCTGCCTCAGGCCATGAACATCACCTGCA | |
| | CAGGACGGGGACCAGACAACTGTATCCAGTGTGCCCACTACATTGACGGCCCCCACTGCGTCAAGACCTG | |
| | CCCGGCAGGAGTCATGGGAGAAAACAACACCCTGGTCTGGAAGTACGCAGACGCCGGCCATGTGTGCCAC | |
| | CTGTGCCATCCAAACTGCACCTACGGATGCACTGGGCCAGGTCTTGAAGGCTGTCCAACGAATGGGCCTA | |
| | AGATCCCGTCCATCGCCACTGGGATGGTGGGGGCCCTCCTCTTGCTGCTGGTGGTGGCCCTGGGGATCGG | |
| | CCTCTTCATGCGAAGGCGCCACATCGTTCGGAAGCGCACGCTGCGGAGGCTGCTGCAGGAGAGGGAGCTT | |
| | GTGGAGCCTCTTACACCCAGTGGAGAAGCTCCCAACCAAGCTCTCTTGAGGATCTTGAAGGAAACTGAAT | |
| | TCAAAAAGATCAAAGTGCTGGGCTCCGGTGCGTTCGGCACGGTGTATAAGGGACTCTGGATCCCAGAAGG | |
| | TGAGAAAGTTAAAATTCCCGTCGCTATCAAGGAATTAAGAGAAGCAACATCTCCGAAAGCCAACAAGGAA | |
| | ATCCTCGATGAAGCCTACGTGATGGCCAGCGTGGACAACCCCCACGTGTGCCGCCTGCTGGGCATCTGCC | |
| | TCACCTCCACCGTGCAGCTCATCACGCAGCTCATGCCCTTCGGCTGCCTCCTGGACTATGTCCGGGAACA | |
| | CAAAGACAATATTGGCTCCCAGTACCTGCTCAACTGGTGTGTGCAGATCGCAAAGGGCATGAACTACTTG | |
| | GAGGACCGTCGCTTGGTGCACCGCGACCTGGCAGCCAGGAACGTACTGGTGAAAACACCGCAGCATGTCA | |
| | AGATCACAGATTTTGGGCTGGCCAAACTGCTGGGTGCGGAAGAGAAAGAATACCATGCAGAAGGAGGCAA | |
| | AGTGCCTATCAAGTGGATGGCATTGGAATCAATTTTACACAGAATCTATACCCACCAGAGTGATGTCTGG | |
| | AGCTACGGGGTGACCGTTTGGGAGTTGATGACCTTTGGATCCAAGCCATATGACGGAATCCCTGCCAGCG | |
| | AGATCTCCTCCATCCTGGAGAAAGGAGAACGCCTCCCTCAGCCACCCATATGTACCATCGATGTCTACAT | |
| | GATCATGGTCAAGTGCTGGATGATAGACGCAGATAGTCGCCCAAAGTTCCGTGAGTTGATCATCGAATTC | |
| | TCCAAAATGGCCCGAGACCCCCAGCGCTACCTTGTCATTCAGGGGGATGAAAGAATGCATTTGCCAAGTC | |
| | CTACAGACTCCAACTTCTACCGTGCCCTGATGGATGAAGAAGACATGGACGACGTGGTGGATGCCGACGA | |
| | GTACCTCATCCCACAGCAGGGCTTCTTCAGCAGCCCCTCCACGTCACGGACTCCCCTCCTGAGCTCTCTG | |
| | AGTGCAACCAGCAACAATTCCACCGTGGCTTGCATTGATAGAAATGGGCTGCAAAGCTGTCCCATCAAGG | |
| | AAGACAGCTTCTTGCAGCGATACAGCTCAGACCCCACAGGCGCCTTGACTGAGGACAGCATAGACGACAC | |
| | CTTCCTCCCAGTGCCTGAATACATAAACCAGTCCGTTCCCAAAAGGCCCGCTGGCTCTGTGCAGAATCCT | |
| | GTCTATCACAATCAGCCTCTGAACCCCGCGCCCAGCAGAGACCCACACTACCAGGACCCCCACAGCACTG | |
| | CAGTGGGCAACCCCGAGTATCTCAACACTGTCCAGCCCACCTGTGTCAACAGCACATTCGACAGCCCTGC | |
| | CCACTGGGCCCAGAAAGGCAGCCACCAAATTAGCCTGGACAACCCTGACTACCAGCAGGACTTCTTTCCC | |
| | AAGGAAGCCAAGCCAAATGGCATCTTTAAGGGCTCCACAGCTGAAAATGCAGAATACCTAAGGGTCGCGC | |
| | CACAAAGCAGTGAATTTATTGGAGCATGACCACGGAGGATAGTATGAGCCCTAAAAATCCAGACTCTTTC | |
| | GATACCCAGGACCAAGCCACAGCAGGTCCTCCATCCCAACAGCCATGCCCGCATTAGCTCTTAGACCCAC | |
| | AGACTGGTTTTGCAACGTTTACACCGACTAGCCAGGAAGTACTTCCACCTCGGGCACATTTTGGGAAGTT | |
| | GCATTCCTTTGTCTTCAAACTGTGAAGCATTTACAGAAACGCATCCAGCAAGAATATTGTCCCTTTGAGC | |
| | AGAAATTTATCTTTCAAAGAGGTATATTTGAAAAAAAAAAAAAGTATATGTGAGGATTTTTATTGATTGG | |
| | GGATCTTGGAGTTTTTCATTGTCGCTATTGATTTTTACTTCAATGGGCTCTTCCAACAAGGAAGAAGCTT | |
| | GCTGGTAGCACTTGCTACCCTGAGTTCATCCAGGCCCAACTGTGAGCAAGGAGCACAAGCCACAAGTCTT | |
| | CCAGAGGATGCTTGATTCCAGTGGTTCTGCTTCAAGGCTTCCACTGCAAAACACTAAAGATCCAAGAAGG | |
| | CCTTCATGGCCCCAGCAGGCCGGATCGGTACTGTATCAAGTCATGGCAGGTACAGTAGGATAAGCCACTC | |
| | TGTCCCTTCCTGGGCAAAGAAGAAACGGAGGGGATGGAATTCTTCCTTAGACTTACTTTTGTAAAAATGT | |
| | CCCCACGGTACTTACTCCCCACTGATGGACCAGTGGTTTCCAGTCATGAGCGTTAGACTGACTTGTTTGT | |
| | CTTCCATTCCATTGTTTTGAAACTCAGTATGCTGCCCCTGTCTTGCTGTCATGAAATCAGCAAGAGAGGA | |
| | TGACACATCAAATAATAACTCGGATTCCAGCCCACATTGGATTCATCAGCATTTGGACCAATAGCCCACA | |
| | GCTGAGAATGTGGAATACCTAAGGATAGCACCGCTTTTGTTCTCGCAAAAACGTATCTCCTAATTTGAGG | |
| | CTCAGATGAAATGCATCAGGTCCTTTGGGGCATAGATCAGAAGACTACAAAAATGAAGCTGCTCTGAAAT | |
| | CTCCTTTAGCCATCACCCCAACCCCCCAAAATTAGTTTGTGTTACTTATGGAAGATAGTTTTCTCCTTTT | |
| | ACTTCACTTCAAAAGCTTTTTACTCAAAGAGTATATGTTCCCTCCAGGTCAGCTGCCCCCAAACCCCCTC | |
| | CTTACGCTTTGTCACACAAAAAGTGTCTCTGCCTTGAGTCATCTATTCAAGCACTTACAGCTCTGGCCAC | |
| | AACAGGGCATTTTACAGGTGCGAATGACAGTAGCATTATGAGTAGTGTGGAATTCAGGTAGTAAATATGA | |
| | AACTAGGGTTTGAAATTGATAATGCTTTCACAACATTTGCAGATGTTTTAGAAGGAAAAAAGTTCCTTCC | |
| | TAAAATAATTTCTCTACAATTGGAAGATTGGAAGATTCAGCTAGTTAGGAGCCCACCTTTTTTCCTAATC | |
| | TGTGTGTGCCCTGTAACCTGACTGGTTAACAGCAGTCCTTTGTAAACAGTGTTTTAAACTCTCCTAGTCA | |
| | ATATCCACCCCATCCAATTTATCAAGGAAGAAATGGTTCAGAAAATATTTTCAGCCTACAGTTATGTTCA | |
| | GTCACACACACATACAAAATGTTCCTTTTGCTTTTAAAGTAATTTTTGACTCCCAGATCAGTCAGAGCCC | |
| | CTACAGCATTGTTAAGAAAGTATTTGATTTTTGTCTCAATGAAAATAAAACTATATTCATTTCCACTCTA | |
| | AAAAAAAAAAAAAAAA | |
| KRT6B | CGCCTCCAGCCTCTCACACTCTCCTAAGCCCTCTCATCTCCTGGAACCATGGCCAGCACATCCACCACCA | 181 |
| NM_005555.3 | TCAGGAGCCACAGCAGCAGCCGCCGGGGTTTCAGTGCCAACTCAGCCAGGCTCCCTGGGGTCAGCCGCTC | |
| | TGGCTTCAGCAGCATCTCCGTGTCCCGCTCCAGGGGCAGTGGTGGCCTGGGTGGCGCATGTGGAGGAGCT | |
| | GGCTTTGGCAGCCGCAGTCTGTATGGCCTGGGGGGCTCCAAGAGGATCTCCATTGGAGGGGGCAGCTGTG | |
| | CCATCAGTGGCGGCTATGGCAGCAGAGCCGGAGGCAGCTATGGCTTTGGTGGCGCCGGGAGTGGATTTGG | |
| | TTTCGGTGGTGGAGCCGGCATTGGCTTTGGTCTGGGTGGTGGAGCCGGCCTTGCTGGTGGCTTTGGGGGC | |
| | CCTGGCTTCCCTGTGTGCCCCCCTGGAGGCATCCAAGAGGTCACTGTCAACCAGAGTCTCCTGACTCCCC | |
| | TCAACCTGCAAATTGACCCCGCCATCCAGCGGGTGCGGGCCGAGGAGCGTGAGCAGATCAAGACCCTCAA | |
| | CAACAAGTTTGCCTCCTTCATCGACAAGGTGCGGTTCCTAGAGCAGCAGAACAAGGTTCTGGACACCAAG | |
| | TGGACCCTGCTGCAGGAGCAGGGCACCAAGACTGTGAGGCAGAACCTGGAGCCGTTGTTCGAGCAGTACA | |
| | TCAACAACCTCAGGAGGCAGCTGGACAACATCGTGGGGGAACGGGGTCGTCTGGACTCGGAGCTGAGAAA | |
| | CATGCAGGACCTGGTGGAGGACCTCAAGAACAAATATGAGGATGAAATCAACAAGCGCACAGCAGCAGAG | |
| | AATGAATTTGTGACTCTGAAGAAGGATGTGGATGCTGCCTACATGAACAAGGTTGAACTGCAAGCCAAGG | |
| | CAGACACTCTTACAGATGAGATCAACTTCCTGAGAGCCTTGTATGATGCAGAGCTGTCCCAGATGCAGAC | |
| | CCACATCTCAGACACATCCGTGGTGCTATCCATGGACAACAACCGCAACCTGGACCTGGACAGCATCATC | |
| | GCTGAGGTCAAGGCCCAATATGAGGAGATTGCTCAGAGGAGCAGGGCTGAGGCTGAGTCCTGGTACCAGA | |
| | CAAAGTACGAGGAGCTGCAGATCACAGCAGGCAGACATGGGGACGACCTGCGCAACACCAAGCAGGAGAT | |
| | TGCTGAGATCAACCGCATGATCCAGAGGCTGAGATCTGAGATCGACCACGTCAAGAAGCAGTGTGCCAAC | |
| | CTACAGGCCGCCATTGCTGATGCTGAGCAGCGTGGGGAGATGGCCCTCAAGGATGCTAAGAACAAGCTGG | |
| | AAGGGCTGGAGGATGCCCTGCAGAAGGCCAAGCAGGACCTGGCCCGGCTGCTGAAGGAGTACCAGGAGCT | |
| | GATGAACGTCAAGCTGGCCCTGGATGTGGAGATCGCCACCTACCGCAAGCTGCTGGAGGGCGAGGAGTGC | |
| | AGGCTGAATGGCGAAGGCGTTGGACAAGTCAACATCTCTGTAGTGCAGTCCACCGTCTCCAGTGGCTATG | |
| | GCGGTGCCAGCGGTGTCGGCAGTGGCTTAGGCCTGGGTGGAGGAAGCAGCTACTCCTATGGCAGTGGTCT | |
| | TGGCGTTGGAGGCGGCTTTAGTTCCAGCAGCGGCAGAGCCACTGGGGGTGGCCTCAGCTCTGTTGGAGGC | |
| | GGCAGTTCCACCATCAAGTACACCACCACCTCCTCCTCCAGCAGGAAGAGCTACAAGCACTGAAGTGCTG | |
| | CCGCCAGCTCTCAGTCCCACAGCTCTCAGGCCCCTCTCTGGCAGCAGAGCCCTCTCCTCAGGTTGCTTGT | |
| | CCTCCCCTGGCCTCCAGTCTCCCCTGCCCTCCCGGGTAGAGCTGGGATGCCCTCACTTTTCTTCTCATCA | |
| | ATACCTGTTCCACTGAGCTCCTGTTGCTTACCATCAAGTCAACAGTTATCAGCACTCAGACATGCGAATG | |
| | TCCTTTTTAGTTCCCGTATTATTACAGGTATCTGAGTCTGCCATAATTCTGAGAAGAAAATGACCTATAT | |
| | CCCCATAAGAACTGAAACTCAGTCTAGGTCCAGCTGCAGATGAGGAGTCCTCTCTTTAATTGCTAACCAT | |
| | CCTGCCCATTATAGCTACACTCAGGAGTTCTCATCTGACAAGTCAGTTGTCCTGATCTTCTCTTGCAGTG | |
| | TCCCTGAATGGCAAGTGATGTACCTTCTGATGCAGTCTGCATTCCTGCACTGCTTTCTCTGCTCTCTTTG | |
| | CCTTCTTTTGTTCTGTTGAATAAAGCATATTGAGAATGTGAAAAAAAAAAAAAAAAAAAAAAAAAAAAAA | |
| | AAAAAAAAAAAAAAAAAAAAA | |
| MYC | GACCCCCGAGCTGTGCTGCTCGCGGCCGCCACCGCCGGGCCCCGGCCGTCCCTGGCTCCCCTCCTGCCTC | 182 |
| NM_002467.4 | GAGAAGGGCAGGGCTTCTCAGAGGCTTGGCGGGAAAAAGAACGGAGGGAGGGATCGCGCTGAGTATAAAA | |
| | GCCGGTTTTCGGGGCTTTATCTAACTCGCTGTAGTAATTCCAGCGAGAGGCAGAGGGAGCGAGCGGGCGG | |
| | CCGGCTAGGGTGGAAGAGCCGGGCGAGCAGAGCTGCGCTGCGGGCGTCCTGGGAAGGGAGATCCGGAGCG | |
| | AATAGGGGGCTTCGCCTCTGGCCCAGCCCTCCCGCTGATCCCCCAGCCAGCGGTCCGCAACCCTTGCCGC | |
| | ATCCACGAAACTTTGCCCATAGCAGCGGGCGGGCACTTTGCACTGGAACTTACAACACCCGAGCAAGGAC | |
| | GCGACTCTCCCGACGCGGGGAGGCTATTCTGCCCATTTGGGGACACTTCCCCGCCGCTGCCAGGACCCGC | |
| | TTCTCTGAAAGGCTCTCCTTGCAGCTGCTTAGACGCTGGATTTTTTTCGGGTAGTGGAAAACCAGCAGCC | |
| | TCCCGCGACGATGCCCCTCAACGTTAGCTTCACCAACAGGAACTATGACCTCGACTACGACTCGGTGCAG | |
| | CCGTATTTCTACTGCGACGAGGAGGAGAACTTCTACCAGCAGCAGCAGCAGAGCGAGCTGCAGCCCCCGG | |
| | CGCCCAGCGAGGATATCTGGAAGAAATTCGAGCTGCTGCCCACCCCGCCCCTGTCCCCTAGCCGCCGCTC | |
| | CGGGCTCTGCTCGCCCTCCTACGTTGCGGTCACACCCTTCTCCCTTCGGGGAGACAACGACGGCGGTGGC | |
| | GGGAGCTTCTCCACGGCCGACCAGCTGGAGATGGTGACCGAGCTGCTGGGAGGAGACATGGTGAACCAGA | |
| | GTTTCATCTGCGACCCGGACGACGAGACCTTCATCAAAAACATCATCATCCAGGACTGTATGTGGAGCGG | |
| | CTTCTCGGCCGCCGCCAAGCTCGTCTCAGAGAAGCTGGCCTCCTACCAGGCTGCGCGCAAAGACAGCGGC | |
| | AGCCCGAACCCCGCCCGCGGCCACAGCGTCTGCTCCACCTCCAGCTTGTACCTGCAGGATCTGAGCGCCG | |
| | CCGCCTCAGAGTGCATCGACCCCTCGGTGGTCTTCCCCTACCCTCTCAACGACAGCAGCTCGCCCAAGTC | |
| | CTGCGCCTCGCAAGACTCCAGCGCCTTCTCTCCGTCCTCGGATTCTCTGCTCTCCTCGACGGAGTCCTCC | |
| | CCGCAGGGCAGCCCCGAGCCCCTGGTGCTCCATGAGGAGACACCGCCCACCACCAGCAGCGACTCTGAGG | |
| | AGGAACAAGAAGATGAGGAAGAAATCGATGTTGTTTCTGTGGAAAAGAGGCAGGCTCCTGGCAAAAGGTC | |
| | AGAGTCTGGATCACCTTCTGCTGGAGGCCACAGCAAACCTCCTCACAGCCCACTGGTCCTCAAGAGGTGC | |
| | CACGTCTCCACACATCAGCACAACTACGCAGCGCCTCCCTCCACTCGGAAGGACTATCCTGCTGCCAAGA | |
| | GGGTCAAGTTGGACAGTGTCAGAGTCCTGAGACAGATCAGCAACAACCGAAAATGCACCAGCCCCAGGTC | |
| | CTCGGACACCGAGGAGAATGTCAAGAGGCGAACACACAACGTCTTGGAGCGCCAGAGGAGGAACGAGCTA | |
| | AAACGGAGCTTTTTTGCCCTGCGTGACCAGATCCCGGAGTTGGAAAACAATGAAAAGGCCCCCAAGGTAG | |
| | TTATCCTTAAAAAAGCCACAGCATACATCCTGTCCGTCCAAGCAGAGGAGCAAAAGCTCATTTCTGAAGA | |
| | GGACTTGTTGCGGAAACGACGAGAACAGTTGAAACACAAACTTGAACAGCTACGGAACTCTTGTGCGTAA | |
| | GGAAAAGTAAGGAAAACGATTCCTTCTAACAGAAATGTCCTGAGCAATCACCTATGAACTTGTTTCAAAT | |
| | GCATGATCAAATGCAACCTCACAACCTTGGCTGAGTCTTGAGACTGAAAGATTTAGCCATAATGTAAACT | |
| | GCCTCAAATTGGACTTTGGGCATAAAAGAACTTTTTTATGCTTACCATCTTTTTTTTTTCTTTAACAGAT | |
| | TTGTATTTAAGAATTGTTTTTAAAAAATTTTAAGATTTACACAATGTTTCTCTGTAAATATTGCCATTAA | |
| | ATGTAAATAACTTTAATAAAACGTTTATAGCAGTTACACAGAATTTCAATCCTAGTATATAGTACCTAGT | |
| | ATTATAGGTACTATAAACCCTAATTTTTTTTATTTAAGTACATTTTGCTTTTTAAAGTTGATTTTTTTCT | |
| | ATTGTTTTTAGAAAAAATAAAATAACTGGCAAATATATCATTGAGCCAAATCTTAAAAAAAAAAAAAAA | |
| KRT5 | TCGACAGCTCTCTCGCCCAGCCCAGTTCTGGAAGGGATAAAAAGGGGGCATCACCGTTCCTGGGTAACAG | 183 |
| NM_000424.3 | AGCCACCTTCTGCGTCCTGCTGAGCTCTGTTCTCTCCAGCACCTCCCAACCCACTAGTGCCTGGTTCTCT | |
| | TGCTCCACCAGGAACAAGCCACCATGTCTCGCCAGTCAAGTGTGTCCTTCCGGAGCGGGGGCAGTCGTAG | |
| | CTTCAGCACCGCCTCTGCCATCACCCCGTCTGTCTCCCGCACCAGCTTCACCTCCGTGTCCCGGTCCGGG | |
| | GGTGGCGGTGGTGGTGGCTTCGGCAGGGTCAGCCTTGCGGGTGCTTGTGGAGTGGGTGGCTATGGCAGCC | |
| | GGAGCCTCTACAACCTGGGGGGCTCCAAGAGGATATCCATCAGCACTAGTGGTGGCAGCTTCAGGAACCG | |
| | GTTTGGTGCTGGTGCTGGAGGCGGCTATGGCTTTGGAGGTGGTGCCGGTAGTGGATTTGGTTTCGGCGGT | |
| | GGAGCTGGTGGTGGCTTTGGGCTCGGTGGCGGAGCTGGCTTTGGAGGTGGCTTCGGTGGCCCTGGCTTTC | |
| | CTGTCTGCCCTCCTGGAGGTATCCAAGAGGTCACTGTCAACCAGAGTCTCCTGACTCCCCTCAACCTGCA | |
| | AATCGACCCCAGCATCCAGAGGGTGAGGACCGAGGAGCGCGAGCAGATCAAGACCCTCAACAATAAGTTT | |
| | GCCTCCTTCATCGACAAGGTGCGGTTCCTGGAGCAGCAGAACAAGGTTCTGGACACCAAGTGGACCCTGC | |
| | TGCAGGAGCAGGGCACCAAGACTGTGAGGCAGAACCTGGAGCCGTTGTTCGAGCAGTACATCAACAACCT | |
| | CAGGAGGCAGCTGGACAGCATCGTGGGGGAACGGGGCCGCCTGGACTCAGAGCTGAGAAACATGCAGGAC | |
| | CTGGTGGAAGACTTCAAGAACAAGTATGAGGATGAAATCAACAAGCGTACCACTGCTGAGAATGAGTTTG | |
| | TGATGCTGAAGAAGGATGTAGATGCTGCCTACATGAACAAGGTGGAGCTGGAGGCCAAGGTTGATGCACT | |
| | GATGGATGAGATTAACTTCATGAAGATGTTCTTTGATGCGGAGCTGTCCCAGATGCAGACGCATGTCTCT | |
| | GACACCTCAGTGGTCCTCTCCATGGACAACAACCGCAACCTGGACCTGGATAGCATCATCGCTGAGGTCA | |
| | AGGCCCAGTATGAGGAGATTGCCAACCGCAGCCGGACAGAAGCCGAGTCCTGGTATCAGACCAAGTATGA | |
| | GGAGCTGCAGCAGACAGCTGGCCGGCATGGCGATGACCTCCGCAACACCAAGCATGAGATCTCTGAGATG | |
| | AACCGGATGATCCAGAGGCTGAGAGCCGAGATTGACAATGTCAAGAAACAGTGCGCCAATCTGCAGAACG | |
| | CCATTGCGGATGCCGAGCAGCGTGGGGAGCTGGCCCTCAAGGATGCCAGGAACAAGCTGGCCGAGCTGGA | |
| | GGAGGCCCTGCAGAAGGCCAAGCAGGACATGGCCCGGCTGCTGCGTGAGTACCAGGAGCTCATGAACACC | |
| | AAGCTGGCCCTGGACGTGGAGATCGCCACTTACCGCAAGCTGCTGGAGGGCGAGGAATGCAGACTCAGTG | |
| | GAGAAGGAGTTGGACCAGTCAACATCTCTGTTGTCACAAGCAGTGTTTCCTCTGGATATGGCAGTGGCAG | |
| | TGGCTATGGCGGTGGCCTCGGTGGAGGTCTTGGCGGCGGCCTCGGTGGAGGTCTTGCCGGAGGTAGCAGT | |
| | GGAAGCTACTACTCCAGCAGCAGTGGGGGTGTCGGCCTAGGTGGTGGGCTCAGTGTGGGGGGCTCTGGCT | |
| | TCAGTGCAAGCAGTGGCCGAGGGCTGGGGGTGGGCTTTGGCAGTGGCGGGGGTAGCAGCTCCAGCGTCAA | |
| | ATTTGTCTCCACCACCTCCTCCTCCCGGAAGAGCTTCAAGAGCTAAGAACCTGCTGCAAGTCACTGCCTT | |
| | CCAAGTGCAGCAACCCAGCCCATGGAGATTGCCTCTTCTAGGCAGTTGCTCAAGCCATGTTTTATCCTTT | |
| | TCTGGAGAGTAGTCTAGACCAAGCCAATTGCAGAACCACATTCTTTGGTTCCCAGGAGAGCCCCATTCCC | |
| | AGCCCCTGGTCTCCCGTGCCGCAGTTCTATATTCTGCTTCAAATCAGCCTTCAGGTTTCCCACAGCATGG | |
| | CCCCTGCTGACACGAGAACCCAAAGTTTTCCCAAATCTAAATCATCAAAACAGAATCCCCACCCCAATCC | |
| | CAAATTTTGTTTTGGTTCTAACTACCTCCAGAATGTGTTCAATAAAATGCTTTTATAATATAAAAAAAAA | |
| | AAAAAAAAAA | |
| GSTP1 | TGGGAAAGAGGGAAAGGCTTCCCCGGCCAGCTGCGCGGCGACTCCGGGGACTCCAGGGCGCCCCTCTGCG | 184 |
| NM_000852.3 | GCCGACGCCCGGGGTGCAGCGGCCGCCGGGGCTGGGGCCGGCGGGAGTCCGCGGGACCCTCCAGAAGAGC | |
| | GGCCGGCGCCGTGACTCAGCACTGGGGCGGAGCGGGGCGGGACCACCCTTATAAGGCTCGGAGGCCGCGA | |
| | GGCCTTCGCTGGAGTTTCGCCGCCGCAGTCTTCGCCACCATGCCGCCCTACACCGTGGTCTATTTCCCAG | |
| | TTCGAGGCCGCTGCGCGGCCCTGCGCATGCTGCTGGCAGATCAGGGCCAGAGCTGGAAGGAGGAGGTGGT | |
| | GACCGTGGAGACGTGGCAGGAGGGCTCACTCAAAGCCTCCTGCCTATACGGGCAGCTCCCCAAGTTCCAG | |
| | GACGGAGACCTCACCCTGTACCAGTCCAATACCATCCTGCGTCACCTGGGCCGCACCCTTGGGCTCTATG | |
| | GGAAGGACCAGCAGGAGGCAGCCCTGGTGGACATGGTGAATGACGGCGTGGAGGACCTCCGCTGCAAATA | |
| | CATCTCCCTCATCTACACCAACTATGAGGCGGGCAAGGATGACTATGTGAAGGCACTGCCCGGGCAACTG | |
| | AAGCCTTTTGAGACCCTGCTGTCCCAGAACCAGGGAGGCAAGACCTTCATTGTGGGAGACCAGATCTCCT | |
| | TCGCTGACTACAACCTGCTGGACTTGCTGCTGATCCATGAGGTCCTAGCCCCTGGCTGCCTGGATGCGTT | |
| | CCCCCTGCTCTCAGCATATGTGGGGCGCCTCAGTGCCCGGCCCAAGCTCAAGGCCTTCCTGGCCTCCCCT | |
| | GAGTACGTGAACCTCCCCATCAATGGCAACGGGAAACAGTGAGGGTTGGGGGGACTCTGAGCGGGAGGCA | |
| | GAGTTTGCCTTCCTTTCTCCAGGACCAATAAAATTTCTAAGAGAGCTAAAAAAAAAAAAAAAAAAAAAAA | |
| | AAAAAA | |
| B3GNT5 | ATCCCGCCCGCATACAGCCCGCATCCCGCCGGGGAAGCGAGCCCAGTCCAGCGCTGCCCGTCCAGTCCTC | 185 |
| NM_032047.4 | GCCCAAGATTTAAAGCCCGCAAGTTTTGTTCTTGAGACCAGCGACTTTAGCTCCGATGCGGGAAGGAAAG | |
| | CCGACCTCCGATTTGGACATTTAAAGAGCTGGGCTTGAACTTCGTGAGTTTCGCTCTAAACTGCCCTTGA | |
| | AATGAAGCTGGACTTGGAGGTGGCATGGAATATTCACATGGGAGAGCCGCATGAGGCCGCCCACCACGCT | |
| | TCCTGAAGGATGCCCGTGTGGAAGAATTTTGACGTGCCAGTGTCCTCGTTCTACAGGGTGTTCCATTCTT | |
| | CCGCAATCTCAGAAAAATGGGACTAAAAGAAACTATTTTGTAAAATAAGAAGACTTCCATTTTTAATGAC | |
| | CAACATGTATTAAGATGGACACCTACTCTACGAAACACGAAGTTCTATGGTCTCGAAGAAGCCCGTGCCT | |
| | GTTTAAAACTGATCCTAACTAAAAACAGACTTGAGTGGATATGAGAATGTTGGTTAGTGGCAGAAGAGTC | |
| | AAAAAATGGCAGTTAATTATTCAGTTATTTGCTACTTGTTTTTTAGCGAGCCTCATGTTTTTTTGGGAAC | |
| | CAATCGATAATCACATTGTGAGCCATATGAAGTCATATTCTTACAGATACCTCATAAATAGCTATGACTT | |
| | TGTGAATGATACCCTGTCTCTTAAGCACACCTCAGCGGGGCCTCGCTACCAATACTTGATTAACCACAAG | |
| | GAAAAGTGTCAAGCTCAAGACGTCCTCCTTTTACTGTTTGTAAAAACTGCTCCTGAAAACTATGATCGAC | |
| | GTTCCGGAATTAGAAGGACGTGGGGCAATGAAAATTATGTTCGGTCTCAGCTGAATGCCAACATCAAAAC | |
| | TCTGTTTGCCTTAGGAACTCCTAATCCACTGGAGGGAGAAGAACTACAAAGAAAACTGGCTTGGGAAGAT | |
| | CAAAGGTACAATGATATAATTCAGCAAGACTTTGTTGATTCTTTCTACAATCTTACTCTGAAATTACTTA | |
| | TGCAGTTCAGTTGGGCAAATACCTATTGTCCACATGCCAAATTTCTTATGACTGCTGATGATGACATATT | |
| | TATTCACATGCCAAATCTGATTGAGTACCTTCAAAGTTTAGAACAAATTGGTGTTCAAGACTTTTGGATT | |
| | GGTCGTGTTCATCGTGGTGCCCCTCCCATTAGAGATAAAAGCAGCAAATACTACGTGTCCTATGAAATGT | |
| | ACCAGTGGCCAGCTTACCCTGACTACACAGCCGGAGCTGCCTATGTAATCTCCGGTGATGTAGCTGCCAA | |
| | AGTCTATGAGGCATCACAGACACTAAATTCAAGTCTTTACATAGACGATGTGTTCATGGGCCTCTGTGCC | |
| | AATAAAATAGGGATAGTACCGCAGGACCATGTGTTTTTTTCTGGAGAGGGTAAAACTCCTTATCATCCCT | |
| | GCATCTATGAAAAAATGATGACATCTCATGGACACTTAGAAGATCTCCAGGACCTTTGGAAGAATGCTAC | |
| | AGATCCTAAAGTAAAAACCATTTCCAAAGGTTTTTTTGGTCAAATATACTGCAGATTAATGAAGATAATT | |
| | CTCCTTTGTAAAATTAGCTATGTGGACACATACCCTTGTAGGGCTGCGTTTATCTAATAGTACTTGAATG | |
| | TTGTATGTTTTCACTGTCACTGAGTCAAACCTGGATGAAAAAAACCTTTAAATGTTCGTCTATACCCTAA | |
| | GTAAAATGAGGACGAAAGACAAATATTTTGAAAGCCTAGTCCATCAGAATGTTTCTTTGATTCTAGAAGC | |
| | TGTTTAATATCACTTATCTACTTCATTGCCTAAGTTCATTTCAAAGAATTTGTATTTAGAAAAGGTTTAT | |
| | ATTATTAGTGAAAACAAAACTAAAGGGAAGTTCAAGTTCTCATGTAATGCCACATATATACTTGAGGTGT | |
| | AGAGATGTTATTAAGAAGTTTTGATGTTAGAATAATTGCTTTTGGAAAATACCAAATGAACGTACAGTAC | |
| | AACATTTCAAGGAAATGAATATATTGTTAGACCAGGTAAGCAAGTTTATTTTTGTTAAAGAGCACTTGGT | |
| | GGAGGTAGTAGGGGCAGGGAAAGGTCAGCATAGGAGAGAAAGTTCATGAATCTGGTAAAACAGTCTCTTG | |
| | TTCTTAAGAGGAGATGTAGAAAAATGTGTACAATGTTATTATAAACAGACAAATCACGTCTTACCACATC | |
| | CATGTAGCTACTGGTGTTAGAGTCATTAAAATACCTTTTTTTGCATCTTTTTTCAAAGTTTAATGTGAAC | |
| | TTTTAGAAAAGTGATTAATGTTGCCCTAATACTTTATATGTTTTTAATGGATTTTTTTTTAAGTATTAGA | |
| | AAATGACACATAACACGGGCAGCTGGTTGCTCATAGGGTCCTTCTCTAGGGAGAAACCATTGTTAATTCA | |
| | AATAAGCTGATTTTAATGACGTTTTCAACTGGTTTTTAAATATTCAATATTGGTCTGTGTTTAAGTTTGT | |
| | TATTTGAATGTAATTTACATAGAGGAATATAATAATGGAGAGACTTCAAATGGAAAGACAGAACATTACA | |
| | AGCCTAATGTCTCCATAATTTTATAAAATGAAATCTTAGTGTCTAAATCCTTGTACTGATTACTAAAATT | |
| | AACCCACTCCTCCCCAACAAGGTCTTATAAACCACAGCACTTTGTTCCAAGTTCAGAGTTTTAAATTGAG | |
| | AGCATTAAACATCAAAGTTATAATATCTAAAACAATTTATTTTTCATCAATAACTGTCAGAGGTGATCTT | |
| | TATTTTCTAAATATTTCAAACTTGAAAACAGAGTAAAAAAGTGATAGAAAAGTTGCCAGTTTGGGGTTAA | |
| | AGCATTTTTAAAGCTGCATGTTCCTTGTAATCAAAGAGATGTGTCTGAGATCTAATAGAGTAAGTTACAT | |
| | TTATTTTACAAAGCAGGATAAAAATGTGGCTATAATACACACTACCTCCCTTCACTACAGAAAGAACTAG | |
| | GTGGTGTCTACTGCTAGGGAGATTATATGAAGGCCAAAATAATGACTTCAGCAAGAGTGACTGAACTCAC | |
| | TCTAAGGCCTTTGACTGCAGAGGCACCTGTTAGGGAAAATCAGATGTCTCATATAATAAGGTGATGTCGG | |
| | AAACACGCAAAACAAAACGAAAAAAGATTTCTCAGTATACACAACTGAATGATGATACTTACAATTTTTA | |
| | GCAGGTAGCTTTTTAATGTTTACAGAAATTTTAATTTTTTTCTATTTTGAAATTTGAGGCTTGTTTACAT | |
| | TGCTTAGATAATTTAGAATTTTTAACTAATGTCAAAACTACAGTGTCAAACATTCTAGGTTGTAGTTACT | |
| | TTCAGAGTAGATACAGGGTTTTAGATCATTACAGTTTAAGTTTTCTGACCAATTAAAAAAACATAGAGAA | |
| | CAAAAGCATATTTGACCAAGCAACAAGCTTATAATTAATTTTTATTAGTTGATTGATTAATGATGTATTG | |
| | CCTTTTGCCCATATATACCCTGTGTATCTATACTTGGAAGTGTTTAAGGTTGCCATTGGTTGAAAACATA | |
| | AGTGTCTCTGGCCATCAAAGTGATCTTGTTTACAGCAGTGCTTTTGTGAAACAATTATTTATTTGCTGAA | |
| | AGAGCTCTTCTGAACTGTGTCCTTTTAATTTTTGCTTAGAATAGAATGGAACAAGTTTAAATTTCAAGGA | |
| | AATATGAAGGCACTTCCTTTTTTTCTAAGAAGGAAGTTGCTAGATGATTCCTTCATCACACTTACTTAAA | |
| | GTACTGAGAAGAGTATCTGTAAATAAAAGGGTTCCAACCTTTTAAAAAAGAAGGAAAAAACTTTTTGGTG | |
| | CTCCAGTGTAGGGCTATCTTTTTAAAAAATGTCAACAAAGGGAAAATAAACTATCAGCTTGGATGGTCAC | |
| | TTGAATAGAAGATGGTTATACACAGTGTTATTGTTAAAATTTTTTTACCTTTTGGTTGGTTTGCATCTTT | |
| | TTTCCATATTGTTAATTTTATACCAAAATGTTAAATATTTGTATTACTTGAATTTTGCTCTTGTATGGCA | |
| | AAATAATTAGTGAGTTTAAAAAAAATCTATAGTTTCCAATAAACAACTGAAAAATTATCATGAAAAAAAA | |
| | A | |
| COX6C | TGTGAGCTCCTAGAAGTCAGCTTTTTCACTTTTACCCAAGCCAAACGGTTATTCGCGTAAGGTTGGTTAT | 186 |
| NM_004374.3 | AATTAAAATGTCGGTTTGTGCACATGGTTTGGGACTCTGTGTATGAGTACGACTAATATCTTCAATTTAC | |
| | TAAGAAGATAAAGAGGTCGATAAATAAGGAGGTCAAGCCCGTTTTGCAAGGTCACACAGGAAAGAAGCAG | |
| | ACCACGAAATGAACTTCGGCTGTCACCTGCGGTGGGCGCACTAGAGGTCTTTTGAACTCCTTCGGCTACC | |
| | GTCGCCGCGTTCTCGCTGTGCACTCTTATTCTGCGCCTGCGCGCGGCTACAGCACGGTTCGTTTTTCCTT | |
| | TAGTCAGGAAGGACGTTGGTGTTGAGGTTAGCATACGTATCAAGGACAGTAACTACCATGGCTCCCGAAG | |
| | TTTTGCCAAAACCTCGGATGCGTGGCCTTCTGGCCAGGCGTCTGCGAAATCATATGGCTGTAGCATTCGT | |
| | GCTATCCCTGGGGGTTGCAGCTTTGTATAAGTTTCGTGTGGCTGATCAAAGAAAGAAGGCATACGCAGAT | |
| | TTCTACAGAAACTACGATGTCATGAAAGATTTTGAGGAGATGAGGAAGGCTGGTATCTTTCAGAGTGTAA | |
| | AGTAATCTTGGAATATAAAGAATTTCTTCAGGTTGAATTACCTAGAAGTTTGTCACTGACTTGTGTTCCT | |
| | GAACTATGACACATGAATATGTGGGCTAAGAAATAGTTCCTCTTGATAAATAAACAATTAACAAATACTT | |
| | TGGACAGTAAGTCTTTCTCAGTTCTTAATGATAATGCAGGGCACTTACTAGCATAAGAATTGGTTTGGGA | |
| | TTTAACTGTTTATGAAGCTAACTTGATTTCCGTGTTTTGTTAAAATTTCATTGTTCTAGCACATCTTTAA | |
| | CTGTGATAGTT | |
| FZD7 | CTCTCCCAACCGCCTCGTCGCACTCCTCAGGCTGAGAGCACCGCTGCACTCGCGGCCGGCGATGCGGGAC | 187 |
| NM_003507.1 | CCCGGCGCGGCCGCTCCGCTTTCGTCCCTGGGCCTCTGTGCCCTGGTGCTGGCGCTGCTGGGCGCACTGT | |
| | CCGCGGGCGCCGGGGCGCAGCCGTACCACGGAGAGAAGGGCATCTCCGTGCCGGACCACGGCTTCTGCCA | |
| | GCCCATCTCCATCCCGCTGTGCACGGACATCGCCTACAACCAGACCATCCTGCCCAACCTGCTGGGCCAC | |
| | ACGAACCAAGAGGACGCGGGCCTCGAGGTGCACCAGTTCTACCCGCTGGTGAAGGTGCAGTGTTCTCCCG | |
| | AACTCCGCTTTTTCTTATGCTCCATGTATGCGCCCGTGTGCACCGTGCTCGATCAGGCCATCCCGCCGTG | |
| | TCGTTCTCTGTGCGAGCGCGCCCGCCAGGGCTGCGAGGCGCTCATGAACAAGTTCGGCTTCCAGTGGCCC | |
| | GAGCGGCTGCGCTGCGAGAACTTCCCGGTGCACGGTGCGGGCGAGATCTGCGTGGGCCAGAACACGTCGG | |
| | ACGGCTCCGGGGGCCCAGGCGGCGGCCCCACTGCCTACCCTACCGCGCCCTACCTGCCGGACCTGCCCTT | |
| | CACCGCGCTGCCCCCGGGGGCCTCAGATGGCAGGGGGCGTCCCGCCTTCCCCTTCTCATGCCCCCGTCAG | |
| | CTCAAGGTGCCCCCGTACCTGGGCTACCGCTTCCTGGGTGAGCGCGATTGTGGCGCCCCGTGCGAACCGG | |
| | GCCGTGCCAACGGCCTGATGTACTTTAAGGAGGAGGAGAGGCGCTTCGCCCGCCTCTGGGTGGGCGTGTG | |
| | GTCCGTGCTGTGCTGCGCCTCGACGCTCTTTACCGTTCTCACCTACCTGGTGGACATGCGGCGCTTCAGC | |
| | TACCCAGAGCGGCCCATCATCTTCCTGTCGGGCTGCTACTTCATGGTGGCCGTGGCGCACGTGGCCGGCT | |
| | TCCTTCTAGAGGACCGCGCCGTGTGCGTGGAGCGCTTCTCGGACGATGGCTACCGCACGGTGGCGCAGGG | |
| | CACCAAGAAGGAGGGCTGCACCATCCTCTTCATGGTGCTCTACTTCTTCGGCATGGCCAGCTCCATCTGG | |
| | TGGGTCATTCTGTCTCTCACTTGGTTCCTGGCGGCCGGCATGAAGTGGGGCCACGAGGCCATCGAGGCCA | |
| | ACTCGCAGTACTTCCACCTGGCCGCGTGGGCCGTGCCCGCCGTCAAGACCATCACTATCCTGGCCATGGG | |
| | CCAGGTAGACGGGGACCTGCTGAGCGGGGTGTGCTACGTTGGCCTCTCCAGTGTGGACGCGCTGCGGGGC | |
| | TTCGTGCTGGCGCCTCTGTTCGTCTACCTCTTCATAGGCACGTCCTTCTTGCTGGCCGGCTTCGTGTCCC | |
| | TCTTCCGTATCCGCACCATCATGAAACACGACGGCACCAAGACCGAGAAGCTGGAGAAGCTCATGGTGCG | |
| | CATCGGCGTCTTCAGCGTGCTCTACACAGTGCCCGCCACCATCGTCCTGGCCTGCTACTTCTACGAGCAG | |
| | GCCTTCCGCGAGCACTGGGAGCGCACCTGGCTCCTGCAGACGTGCAAGAGCTATGCCGTGCCCTGCCCGC | |
| | CCGGCCACTTCCCGCCCATGAGCCCCGACTTCACCGTCTTCATGATCAAGTACCTGATGACCATGATCGT | |
| | CGGCATCACCACTGGCTTCTGGATCTGGTCGGGCAAGACCCTGCAGTCGTGGCGCCGCTTCTACCACAGA | |
| | CTTAGCCACAGCAGCAAGGGGGAGACTGCGGTATGAGCCCCGGCCCCTCCCCACCTTTCCCACCCCAGCC | |
| | CTCTTGCAAGAGGAGAGGCACGGTAGGGAAAAGAACTGCTGGGTGGGGGCCTGTTTCTGTAACTTTCTCC | |
| | CCCTCTACTGAGAAGTGACCTGGAAGTGAGAAGTTCTTTGCAGATTTGGGGCGAGGGGTGATTTGGAAAA | |
| | GAAGACCTGGGTGGAAAGCGGTTTGGATGAAAAGATTTCAGGCAAAGACTTGCAGGAAGATGATGATAAC | |
| | GGCGATGTGAATCGTCAAAGGTACGGGCCAGCTTGTGCCTAATAGAAGGTTGAGACCAGCAGAGACTGCT | |
| | GTGAGTTTCTCCCGGCTCCGAGGCTGAACGGGGACTGTGAGCGATCCCCCTGCTGCAGGGCGAGTGGCCT | |
| | GTCCAGACCCCTGTGAGGCCCCGGGAAAGGTACAGCCCTGTCTGCGGTGGCTGCTTTGTTGGAAAGAGGG | |
| | AGGGCCTCCTGCGGTGTGCTTGTCAAGCAGTGGTCAAACCATAATCTCTTTTCACTGGGGCCAAACTGGA | |
| | GCCCAGATGGGTTAATTTCCAGGGTCAGACATTACGGTCTCTCCTCCCCTGCCCCCTCCCGCCTGTTTTT | |
| | CCTCCCGTACTGCTTTCAGGTCTTGTAAAATAAGCATTTGGAAGTCTTGGGAGGCCTGCCTGCTAGAATC | |
| | CTAATGTGAGGATGCAAAAGAAATGATGATAACATTTTGAGATAAGGCCAAGGAGACGTGGAGTAGGTAT | |
| | TTTTGCTACTTTTTCATTTTCTGGGGAAGGCAGGAGGCAGAAAGACGGGTGTTTTATTTGGTCTAATACC | |
| | CTGAAAAGAAGTGATGACTTGTTGCTTTTCAAAACAGGAATGCATTTTTCCCCTTGTCTTTGTTGTAAGA | |
| | GACAAAAGAGGAAACAAAAGTGTCTCCCTGTGGAAAGGCATAACTGTGACGAAAGCAACTTTTATAGGCA | |
| | AAGCAGCGCAAATCTGAGGTTTCCCGTTGGTTGTTAATTTGGTTGAGATAAACATTCCTTTTTAAGGAAA | |
| | AGTGAAGAGCAGTGTGCTGTCACACACCGTTAAGCCAGAGGTTCTGACTTCGCTAAAGGAAATGTAAGAG | |
| | GTTTTGTTGTCTGTTTTAAATAAATTTAATTCGGAACACATGATCCAACAGACTATGTTAAAATATTCAG | |
| | GGAAATCTCTCCCTTCATTTACTTTTTCTTGCTATAAGCCTATATTTAGGTTTCTTTTCTATTTTTTTCT | |
| | CCCATTTGGATCCTTTGAGGTAAAAAAACATAATGTCTTCAGCCTCATAATAAAGGAAAGTTAATTAAAA | |
| | AAAAAAAGCAAAGAGCCATTTTGTCCTGTTTTCTTGGTTCCATCAATCTGTTTATTAAACATCATCCATA | |
| | TGCTGACCCTGTCTCTGTGTGGTTGGGTTGGGAGGCGATCAGCAGATACCATAGTGAACGAAGAGGAAGG | |
| | TTTGAACCATGGGCCCCATCTTTAAAGAAAGTCATTAAAAGAAGGTAAACTTCAAAGTGATTCTGGAGTT | |
| | CTTTGAAATGTGCTGGAAGACTTAAATTTATTAATCTTAAATCATGTACTTTTTTTCTGTAATAGAACTC | |
| | GGATTCTTTTGCATGATGGGGTAAAGCTTAGCAGAGAATCATGGGAGCTAACCTTTATCCCACCTTTGAC | |
| | ACTACCCTCCAATCTTGCAACACTATCCTGTTTCTCAGAACAGTTTTTAAATGCCAATCATAGAGGGTAC | |
| | TGTAAAGTGTACAAGTTACTTTATATATGTAATGTTCACTTGAGTGGAACTGCTTTTTACATTAAAGTTA | |
| | AAATCGATCTTGTGTTTCTTCAACCTTCAAAACTATCTCATCTGTCAGATTTTTAAAACTCCAACACAGG | |
| | TTTTGGCATCTTTTGTGCTGTATCTTTTAAGTGCATGTGAAATTTGTAAAATAGAGATAAGTACAGTATG | |
| | TATATTTTGTAAATCTCCCATTTTTGTAAGAAAATATATATTGTATTTATACATTTTTACTTTGGATTTT | |
| | TGTTTTGTTGGCTTTAAAGGTCTACCCCACTTTATCACATGTACAGATCACAAATAAATTTTTTTAAATA | |
| | C | |
| TCEAL1 | TCTTTTTTTTGCCTGTCCACCATCTCCCTATTACCCTTTGGTCGAGAGGGAAAGCAGAAGAAGTCTGCTG | 188 |
| NM_004780.2 | GTCACAGCGGGGCACCTCGAGGAGAGGACGACTAGGAGCACACGGCCCGGAAAGGTCCAGGTCAGGGAAG | |
| | GGAATAACTGTGCTTGAAGAAGAAAATTCCCAACATGGACAAACCACGCAAAGAAAATGAAGAAGAGCCG | |
| | CAGAGCGCGCCCAAGACCGATGAGGAGAGGCCTCCGGTGGAGCACTCTCCCGAAAAGCAGTCCCCCGAGG | |
| | AGCAGTCTTCGGAGGAGCAGTCCTCGGAGGAGGAGTTCTTTCCTGAGGAGCTCTTGCCTGAGCTCCTGCC | |
| | TGAGATGCTCCTCTCGGAGGAGCGCCCTCCGCAGGAGGGTCTTTCCAGGAAGGACCTGTTTGAGGGGCGC | |
| | CCTCCCATGGAGCAGCCTCCTTGTGGAGTAGGAAAACATAAGCTTGAAGAAGGAAGCTTTAAAGAAAGGT | |
| | TGGCTCGTTCTCGCCCGCAATTTAGAGGGGACATACATGGCAGAAATTTAAGCAATGAGGAGATGATACA | |
| | GGCAGCAGATGAGCTAGAAGAGATGAAAAGAGTAAGAAACAAACTGATGATAATGCACTGGAAGGCAAAA | |
| | CGGAGCCGTCCTTATCCTATTTAATGTGTTCGGCCTTTAATTCTGTTTTGCCTGCTAATAGTATTGCCAT | |
| | TGCCACCTGGACTTTCTGTTTGCATTTTCTTAATGCCTTTTCCCATATTCTGAATTTTAACTTTTTGTGA | |
| | GGCTTTATTTTAGATGTTTAGCATGTAACTCGCTTAAAGTTGAGGTTTCCCCCTAAAATCTACAAGTTTC | |
| | CCTCTTTCAGTCATGAGCCCTACACATTTGCATGAAAGATGTACATTATATATTGTGAAACGAAAAAAGC | |
| | AATTTTCAAATGGTATATATTGTATCCCATTTTTGTAAAAAAAATGTATATTTATATATTAATATGCAAA | |
| | GAAAAAGCTAAAAGTATAGACTTCAAAGGCATAACAGTGGTTGTGTGGTAAGATAATAGGTGATTTTTTA | |
| | AATTTTTGTTTTATCTGAATTTCTCATTTTTTCAGGACAAACGTTTTACTTGTGTTGCAAAAATATATAA | |
| | TGAAAAAATCACACAATTTTGAAGAAAACTGTCAATCAGCTTATAACGACAATGTGGCACTTAATAAATA | |
| | CTTGTCAGAACTTTAAAAAAAAAAAAAAAA | |
| KIT | TCTGGGGGCTCGGCTTTGCCGCGCTCGCTGCACTTGGGCGAGAGCTGGAACGTGGACCAGAGCTCGGATC | 189 |
| NM_000222.2 | CCATCGCAGCTACCGCGATGAGAGGCGCTCGCGGCGCCTGGGATTTTCTCTGCGTTCTGCTCCTACTGCT | |
| | TCGCGTCCAGACAGGCTCTTCTCAACCATCTGTGAGTCCAGGGGAACCGTCTCCACCATCCATCCATCCA | |
| | GGAAAATCAGACTTAATAGTCCGCGTGGGCGACGAGATTAGGCTGTTATGCACTGATCCGGGCTTTGTCA | |
| | AATGGACTTTTGAGATCCTGGATGAAACGAATGAGAATAAGCAGAATGAATGGATCACGGAAAAGGCAGA | |
| | AGCCACCAACACCGGCAAATACACGTGCACCAACAAACACGGCTTAAGCAATTCCATTTATGTGTTTGTT | |
| | AGAGATCCTGCCAAGCTTTTCCTTGTTGACCGCTCCTTGTATGGGAAAGAAGACAACGACACGCTGGTCC | |
| | GCTGTCCTCTCACAGACCCAGAAGTGACCAATTATTCCCTCAAGGGGTGCCAGGGGAAGCCTCTTCCCAA | |
| | GGACTTGAGGTTTATTCCTGACCCCAAGGCGGGCATCATGATCAAAAGTGTGAAACGCGCCTACCATCGG | |
| | CTCTGTCTGCATTGTTCTGTGGACCAGGAGGGCAAGTCAGTGCTGTCGGAAAAATTCATCCTGAAAGTGA | |
| | GGCCAGCCTTCAAAGCTGTGCCTGTTGTGTCTGTGTCCAAAGCAAGCTATCTTCTTAGGGAAGGGGAAGA | |
| | ATTCACAGTGACGTGCACAATAAAAGATGTGTCTAGTTCTGTGTACTCAACGTGGAAAAGAGAAAACAGT | |
| | CAGACTAAACTACAGGAGAAATATAATAGCTGGCATCACGGTGACTTCAATTATGAACGTCAGGCAACGT | |
| | TGACTATCAGTTCAGCGAGAGTTAATGATTCTGGAGTGTTCATGTGTTATGCCAATAATACTTTTGGATC | |
| | AGCAAATGTCACAACAACCTTGGAAGTAGTAGATAAAGGATTCATTAATATCTTCCCCATGATAAACACT | |
| | ACAGTATTTGTAAACGATGGAGAAAATGTAGATTTGATTGTTGAATATGAAGCATTCCCCAAACCTGAAC | |
| | ACCAGCAGTGGATCTATATGAACAGAACCTTCACTGATAAATGGGAAGATTATCCCAAGTCTGAGAATGA | |
| | AAGTAATATCAGATACGTAAGTGAACTTCATCTAACGAGATTAAAAGGCACCGAAGGAGGCACTTACACA | |
| | TTCCTAGTGTCCAATTCTGACGTCAATGCTGCCATAGCATTTAATGTTTATGTGAATACAAAACCAGAAA | |
| | TCCTGACTTACGACAGGCTCGTGAATGGCATGCTCCAATGTGTGGCAGCAGGATTCCCAGAGCCCACAAT | |
| | AGATTGGTATTTTTGTCCAGGAACTGAGCAGAGATGCTCTGCTTCTGTACTGCCAGTGGATGTGCAGACA | |
| | CTAAACTCATCTGGGCCACCGTTTGGAAAGCTAGTGGTTCAGAGTTCTATAGATTCTAGTGCATTCAAGC | |
| | ACAATGGCACGGTTGAATGTAAGGCTTACAACGATGTGGGCAAGACTTCTGCCTATTTTAACTTTGCATT | |
| | TAAAGGTAACAACAAAGAGCAAATCCATCCCCACACCCTGTTCACTCCTTTGCTGATTGGTTTCGTAATC | |
| | GTAGCTGGCATGATGTGCATTATTGTGATGATTCTGACCTACAAATATTTACAGAAACCCATGTATGAAG | |
| | TACAGTGGAAGGTTGTTGAGGAGATAAATGGAAACAATTATGTTTACATAGACCCAACACAACTTCCTTA | |
| | TGATCACAAATGGGAGTTTCCCAGAAACAGGCTGAGTTTTGGGAAAACCCTGGGTGCTGGAGCTTTCGGG | |
| | AAGGTTGTTGAGGCAACTGCTTATGGCTTAATTAAGTCAGATGCGGCCATGACTGTCGCTGTAAAGATGC | |
| | TCAAGCCGAGTGCCCATTTGACAGAACGGGAAGCCCTCATGTCTGAACTCAAAGTCCTGAGTTACCTTGG | |
| | TAATCACATGAATATTGTGAATCTACTTGGAGCCTGCACCATTGGAGGGCCCACCCTGGTCATTACAGAA | |
| | TATTGTTGCTATGGTGATCTTTTGAATTTTTTGAGAAGAAAACGTGATTCATTTATTTGTTCAAAGCAGG | |
| | AAGATCATGCAGAAGCTGCACTTTATAAGAATCTTCTGCATTCAAAGGAGTCTTCCTGCAGCGATAGTAC | |
| | TAATGAGTACATGGACATGAAACCTGGAGTTTCTTATGTTGTCCCAACCAAGGCCGACAAAAGGAGATCT | |
| | GTGAGAATAGGCTCATACATAGAAAGAGATGTGACTCCCGCCATCATGGAGGATGACGAGTTGGCCCTAG | |
| | ACTTAGAAGACTTGCTGAGCTTTTCTTACCAGGTGGCAAAGGGCATGGCTTTCCTCGCCTCCAAGAATTG | |
| | TATTCACAGAGACTTGGCAGCCAGAAATATCCTCCTTACTCATGGTCGGATCACAAAGATTTGTGATTTT | |
| | GGTCTAGCCAGAGACATCAAGAATGATTCTAATTATGTGGTTAAAGGAAACGCTCGACTACCTGTGAAGT | |
| | GGATGGCACCTGAAAGCATTTTCAACTGTGTATACACGTTTGAAAGTGACGTCTGGTCCTATGGGATTTT | |
| | TCTTTGGGAGCTGTTCTCTTTAGGAAGCAGCCCCTATCCTGGAATGCCGGTCGATTCTAAGTTCTACAAG | |
| | ATGATCAAGGAAGGCTTCCGGATGCTCAGCCCTGAACACGCACCTGCTGAAATGTATGACATAATGAAGA | |
| | CTTGCTGGGATGCAGATCCCCTAAAAAGACCAACATTCAAGCAAATTGTTCAGCTAATTGAGAAGCAGAT | |
| | TTCAGAGAGCACCAATCATATTTACTCCAACTTAGCAAACTGCAGCCCCAACCGACAGAAGCCCGTGGTA | |
| | GACCATTCTGTGCGGATCAATTCTGTCGGCAGCACCGCTTCCTCCTCCCAGCCTCTGCTTGTGCACGACG | |
| | ATGTCTGAGCAGAATCAGTGTTTGGGTCACCCCTCCAGGAATGATCTCTTCTTTTGGCTTCCATGATGGT | |
| | TATTTTCTTTTCTTTCAACTTGCATCCAACTCCAGGATAGTGGGCACCCCACTGCAATCCTGTCTTTCTG | |
| | AGCACACTTTAGTGGCCGATGATTTTTGTCATCAGCCACCATCCTATTGCAAAGGTTCCAACTGTATATA | |
| | TTCCCAATAGCAACGTAGCTTCTACCATGAACAGAAAACATTCTGATTTGGAAAAAGAGAGGGAGGTATG | |
| | GACTGGGGGCCAGAGTCCTTTCCAAGGCTTCTCCAATTCTGCCCAAAAATATGGTTGATAGTTTACCTGA | |
| | ATAAATGGTAGTAATCACAGTTGGCCTTCAGAACCATCCATAGTAGTATGATGATACAAGATTAGAAGCT | |
| | GAAAACCTAAGTCCTTTATGTGGAAAACAGAACATCATTAGAACAAAGGACAGAGTATGAACACCTGGGC | |
| | TTAAGAAATCTAGTATTTCATGCTGGGAATGAGACATAGGCCATGAAAAAAATGATCCCCAAGTGTGAAC | |
| | AAAAGATGCTCTTCTGTGGACCACTGCATGAGCTTTTATACTACCGACCTGGTTTTTAAATAGAGTTTGC | |
| | TATTAGAGCATTGAATTGGAGAGAAGGCCTCCCTAGCCAGCACTTGTATATACGCATCTATAAATTGTCC | |
| | GTGTTCATACATTTGAGGGGAAAACACCATAAGGTTTCGTTTCTGTATACAACCCTGGCATTATGTCCAC | |
| | TGTGTATAGAAGTAGATTAAGAGCCATATAAGTTTGAAGGAAACAGTTAATACCATTTTTTAAGGAAACA | |
| | ATATAACCACAAAGCACAGTTTGAACAAAATCTCCTCTTTTAGCTGATGAACTTATTCTGTAGATTCTGT | |
| | GGAACAAGCCTATCAGCTTCAGAATGGCATTGTACTCAATGGATTTGATGCTGTTTGACAAAGTTACTGA | |
| | TTCACTGCATGGCTCCCACAGGAGTGGGAAAACACTGCCATCTTAGTTTGGATTCTTATGTAGCAGGAAA | |
| | TAAAGTATAGGTTTAGCCTCCTTCGCAGGCATGTCCTGGACACCGGGCCAGTATCTATATATGTGTATGT | |
| | ACGTTTGTATGTGTGTAGACAAATATTTGGAGGGGTATTTTTGCCCTGAGTCCAAGAGGGTCCTTTAGTA | |
| | CCTGAAAAGTAACTTGGCTTTCATTATTAGTACTGCTCTTGTTTCTTTTCACATAGCTGTCTAGAGTAGC | |
| | TTACCAGAAGCTTCCATAGTGGTGCAGAGGAAGTGGAAGGCATCAGTCCCTATGTATTTGCAGTTCACCT | |
| | GCACTTAAGGCACTCTGTTATTTAGACTCATCTTACTGTACCTGTTCCTTAGACCTTCCATAATGCTACT | |
| | GTCTCACTGAAACATTTAAATTTTACCCTTTAGACTGTAGCCTGGATATTATTCTTGTAGTTTACCTCTT | |
| | TAAAAACAAAACAAAACAAAACAAAAAACTCCCCTTCCTCACTGCCCAATATAAAAGGCAAATGTGTACA | |
| | TGGCAGAGTTTGTGTGTTGTCTTGAAAGATTCAGGTATGTTGCCTTTATGGTTTCCCCCTTCTACATTTC | |
| | TTAGACTACATTTAGAGAACTGTGGCCGTTATCTGGAAGTAACCATTTGCACTGGAGTTCTATGCTCTCG | |
| | CACCTTTCCAAAGTTAACAGATTTTGGGGTTGTGTTGTCACCCAAGAGATTGTTGTTTGCCATACTTTGT | |
| | CTGAAAAATTCCTTTGTGTTTCTATTGACTTCAATGATAGTAAGAAAAGTGGTTGTTAGTTATAGATGTC | |
| | TAGGTACTTCAGGGGCACTTCATTGAGAGTTTTGTCTTGGATATTCTTGAAAGTTTATATTTTTATAATT | |
| | TTTTCTTACATCAGATGTTTCTTTGCAGTGGCTTAATGTTTGAAATTATTTTGTGGCTTTTTTTGTAAAT | |
| | ATTGAAATGTAGCAATAATGTCTTTTGAATATTCCCAAGCCCATGAGTCCTTGAAAATATTTTTTATATA | |
| | TACAGTAACTTTATGTGTAAATACATAAGCGGCGTAAGTTTAAAGGATGTTGGTGTTCCACGTGTTTTAT | |
| | TCCTGTATGTTGTCCAATTGTTGACAGTTCTGAAGAATTCTAATAAAATGTACATATATAAATCAAAAAA | |
| | AAAAAAAAAA | |
| KRT17 | ATCGCTACGCCCACTTGGTGGCCTATAAAGGAAGCGGGCGAACCCCGGCAGCCCTACACAACTTGGGGCC | 190 |
| NM_000422.2 | CCTCTCCTCTCCAGCCCTTCTCCTGTGTGCCTGCCTCCTGCCGCCGCCACCATGACCACCTCCATCCGCC | |
| | AGTTCACCTCCTCCAGCTCCATCAAGGGCTCCTCCGGCCTGGGGGGCGGCTCGTCCCGCACCTCCTGCCG | |
| | GCTGTCTGGCGGCCTGGGTGCCGGCTCCTGCAGGCTGGGATCTGCTGGCGGCCTGGGCAGCACCCTCGGG | |
| | GGTAGCAGCTACTCCAGCTGCTACAGCTTTGGCTCTGGTGGTGGCTATGGCAGCAGCTTTGGGGGTGTTG | |
| | ATGGGCTGCTGGCTGGAGGTGAGAAGGCCACCATGCAGAACCTCAATGACCGCCTGGCCTCCTACCTGGA | |
| | CAAGGTGCGTGCCCTGGAGGAGGCCAACACTGAGCTGGAGGTGAAGATCCGTGACTGGTACCAGAGGCAG | |
| | GCCCCGGGGCCCGCCCGTGACTACAGCCAGTACTACAGGACAATTGAGGAGCTGCAGAACAAGATCCTCA | |
| | CAGCCACCGTGGACAATGCCAACATCCTGCTACAGATTGACAATGCCCGTCTGGCTGCTGATGACTTCCG | |
| | CACCAAGTTTGAGACAGAGCAGGCCCTGCGCCTGAGTGTGGAGGCCGACATCAATGGCCTGCGCAGGGTG | |
| | CTGGATGAGCTGACCCTGGCCAGAGCCGACCTGGAGATGCAGATTGAGAACCTCAAGGAGGAGCTGGCCT | |
| | ACCTGAAGAAGAACCACGAGGAGGAGATGAACGCCCTGCGAGGCCAGGTGGGTGGTGAGATCAATGTGGA | |
| | GATGGACGCTGCCCCAGGCGTGGACCTGAGCCGCATCCTCAACGAGATGCGTGACCAGTATGAGAAGATG | |
| | GCAGAGAAGAACCGCAAGGATGCCGAGGATTGGTTCTTCAGCAAGACAGAGGAACTGAACCGCGAGGTGG | |
| | CCACCAACAGTGAGCTGGTGCAGAGTGGCAAGAGTGAGATCTCGGAGCTCCGGCGCACCATGCAGGCCTT | |
| | GGAGATAGAGCTGCAGTCCCAGCTCAGCATGAAAGCATCCCTGGAGGGCAACCTGGCGGAGACAGAGAAC | |
| | CGCTACTGCGTGCAGCTGTCCCAGATCCAGGGGCTGATTGGCAGCGTGGAGGAGCAGCTGGCCCAGCTTC | |
| | GCTGCGAGATGGAGCAGCAGAACCAGGAATACAAAATCCTGCTGGATGTGAAGACGCGGCTGGAGCAGGA | |
| | GATTGCCACCTACCGCCGCCTGCTGGAGGGAGAGGATGCCCACCTGACTCAGTACAAGAAAGAACCGGTG | |
| | ACCACCCGTCAGGTGCGTACCATTGTGGAAGAGGTCCAGGATGGCAAGGTCATCTCCTCCCGCGAGCAGG | |
| | TCCACCAGACCACCCGCTGAGGACTCAGCTACCCCGGCCGGCCACCCAGGAGGCAGGGAGGCAGCCGCCC | |
| | CATCTGCCCCACAGTCTCCGGCCTCTCCAGCCTCAGCCCCCTGCTTCAGTCCCTTCCCCATGCTTCCTTG | |
| | CCTGATGACAATAAAGCTTGTTGACTCAGCTATG | |
| CDH3 | TGCGTTTTAAAAATTGTCTTTATTTACATTTTACAGAAAGTTGAGAAAGTGTTATTTATATGGGGGGTAG | 191 |
| NM_001793.4 | GGGTGCTGGAGATTATGAGACTAATAACAACCCTCTTAGCTCGCACCCTTTGGCACCACTACAGCTTCCA | |
| | AACTCTGGGACTTTCTCGACTAGCTTCCCTTTGTTTAGCTGTGAAATGGAAGAAGCGGTCCGGGTGTGGC | |
| | GGCTCATGCCTGTAACCTGAGCACTCTGGGAGGCGGAGGATCGCTTGAGTCCAGAAGTTCAAGACCAGCT | |
| | TGGGCAACATAGGGTGACCCTCCACCCTCCCCCCGCCCCACCACATCGCTACAAAAAATTTTTAAAAATT | |
| | AGCCGGGTGTGGTGGCGCAAGCCTGTAGTCTCAGCGGGAGCTGAGGGAGGAGAATCGCTTCAGCCCGGGA | |
| | GGTCGAGGCTGTAGTGAGCCGAGATCGCGCTACTGCACTCCTGGGCGACAGAGCGAGACCCTGTCTCCAA | |
| | AAAAAAAAAAAAAAGAAAAAAGAGGAAGTTGTATCCAATTCAGAAACGCGGTCCTTCGGGACCTGCTAGT | |
| | TTTATACCCCGGAGGATCCTCCCCGGCGGGCTGGCACGGGAGGTGGAGAAAGAGGCTTGGGCGGCCCCGC | |
| | TGTAGCCGCGTGTGGGAGGACGCACGGGCCTGCTTCAAAGCTTTGGGATAACAGCGCCTCCGGGGGATAA | |
| | TGAATGCGGAGCCTCCGTTTTCAGTCGACTTCAGATGTGTCTCCACTTTTTTCCGCTGTAGCCGCAAGGC | |
| | AAGGAAACATTTCTCTTCCCGTACTGAGGAGGCTGAGGAGTGCACTGGGTGTTCTTTTCTCCTCTAACCC | |
| | AGAACTGCGAGACAGAGGCTGAGTCCCTGTAAAGAACAGCTCCAGAAAAGCCAGGAGAGCGCAGGAGGGC | |
| | ATCCGGGAGGCCAGGAGGGGTTCGCTGGGGCCTCAACCGCACCCACATCGGTCCCACCTGCGAGGGGGCG | |
| | GGACCTCGTGGCGCTGGACCAATCAGCACCCACCTGCGCTCACCTGGCCTCCTCCCGCTGGCTCCCGGGG | |
| | GCTGCGGTGCTCAAAGGGGCAAGAGCTGAGCGGAACACCGGCCCGCCGTCGCGGCAGCTGCTTCACCCCT | |
| | CTCTCTGCAGCCATGGGGCTCCCTCGTGGACCTCTCGCGTCTCTCCTCCTTCTCCAGGTTTGCTGGCTGC | |
| | AGTGCGCGGCCTCCGAGCCGTGCCGGGCGGTCTTCAGGGAGGCTGAAGTGACCTTGGAGGCGGGAGGCGC | |
| | GGAGCAGGAGCCCGGCCAGGCGCTGGGGAAAGTATTCATGGGCTGCCCTGGGCAAGAGCCAGCTCTGTTT | |
| | AGCACTGATAATGATGACTTCACTGTGCGGAATGGCGAGACAGTCCAGGAAAGAAGGTCACTGAAGGAAA | |
| | GGAATCCATTGAAGATCTTCCCATCCAAACGTATCTTACGAAGACACAAGAGAGATTGGGTGGTTGCTCC | |
| | AATATCTGTCCCTGAAAATGGCAAGGGTCCCTTCCCCCAGAGACTGAATCAGCTCAAGTCTAATAAAGAT | |
| | AGAGACACCAAGATTTTCTACAGCATCACGGGGCCGGGGGCAGACAGCCCCCCTGAGGGTGTCTTCGCTG | |
| | TAGAGAAGGAGACAGGCTGGTTGTTGTTGAATAAGCCACTGGACCGGGAGGAGATTGCCAAGTATGAGCT | |
| | CTTTGGCCACGCTGTGTCAGAGAATGGTGCCTCAGTGGAGGACCCCATGAACATCTCCATCATCGTGACC | |
| | GACCAGAATGACCACAAGCCCAAGTTTACCCAGGACACCTTCCGAGGGAGTGTCTTAGAGGGAGTCCTAC | |
| | CAGGTACTTCTGTGATGCAGGTGACAGCCACGGATGAGGATGATGCCATCTACACCTACAATGGGGTGGT | |
| | TGCTTACTCCATCCATAGCCAAGAACCAAAGGACCCACACGACCTCATGTTCACCATTCACCGGAGCACA | |
| | GGCACCATCAGCGTCATCTCCAGTGGCCTGGACCGGGAAAAAGTCCCTGAGTACACACTGACCATCCAGG | |
| | CCACAGACATGGATGGGGACGGCTCCACCACCACGGCAGTGGCAGTAGTGGAGATCCTTGATGCCAATGA | |
| | CAATGCTCCCATGTTTGACCCCCAGAAGTACGAGGCCCATGTGCCTGAGAATGCAGTGGGCCATGAGGTG | |
| | CAGAGGCTGACGGTCACTGATCTGGACGCCCCCAACTCACCAGCGTGGCGTGCCACCTACCTTATCATGG | |
| | GCGGTGACGACGGGGACCATTTTACCATCACCACCCACCCTGAGAGCAACCAGGGCATCCTGACAACCAG | |
| | GAAGGGTTTGGATTTTGAGGCCAAAAACCAGCACACCCTGTACGTTGAAGTGACCAACGAGGCCCCTTTT | |
| | GTGCTGAAGCTCCCAACCTCCACAGCCACCATAGTGGTCCACGTGGAGGATGTGAATGAGGCACCTGTGT | |
| | TTGTCCCACCCTCCAAAGTCGTTGAGGTCCAGGAGGGCATCCCCACTGGGGAGCCTGTGTGTGTCTACAC | |
| | TGCAGAAGACCCTGACAAGGAGAATCAAAAGATCAGCTACCGCATCCTGAGAGACCCAGCAGGGTGGCTA | |
| | GCCATGGACCCAGACAGTGGGCAGGTCACAGCTGTGGGCACCCTCGACCGTGAGGATGAGCAGTTTGTGA | |
| | GGAACAACATCTATGAAGTCATGGTCTTGGCCATGGACAATGGAAGCCCTCCCACCACTGGCACGGGAAC | |
| | CCTTCTGCTAACACTGATTGATGTCAATGACCATGGCCCAGTCCCTGAGCCCCGTCAGATCACCATCTGC | |
| | AACCAAAGCCCTGTGCGCCAGGTGCTGAACATCACGGACAAGGACCTGTCTCCCCACACCTCCCCTTTCC | |
| | AGGCCCAGCTCACAGATGACTCAGACATCTACTGGACGGCAGAGGTCAACGAGGAAGGTGACACAGTGGT | |
| | CTTGTCCCTGAAGAAGTTCCTGAAGCAGGATACATATGACGTGCACCTTTCTCTGTCTGACCATGGCAAC | |
| | AAAGAGCAGCTGACGGTGATCAGGGCCACTGTGTGCGACTGCCATGGCCATGTCGAAACCTGCCCTGGAC | |
| | CCTGGAAGGGAGGTTTCATCCTCCCTGTGCTGGGGGCTGTCCTGGCTCTGCTGTTCCTCCTGCTGGTGCT | |
| | GCTTTTGTTGGTGAGAAAGAAGCGGAAGATCAAGGAGCCCCTCCTACTCCCAGAAGATGACACCCGTGAC | |
| | AACGTCTTCTACTATGGCGAAGAGGGGGGTGGCGAAGAGGACCAGGACTATGACATCACCCAGCTCCACC | |
| | GAGGTCTGGAGGCCAGGCCGGAGGTGGTTCTCCGCAATGACGTGGCACCAACCATCATCCCGACACCCAT | |
| | GTACCGTCCTCGGCCAGCCAACCCAGATGAAATCGGCAACTTTATAATTGAGAACCTGAAGGCGGCTAAC | |
| | ACAGACCCCACAGCCCCGCCCTACGACACCCTCTTGGTGTTCGACTATGAGGGCAGCGGCTCCGACGCCG | |
| | CGTCCCTGAGCTCCCTCACCTCCTCCGCCTCCGACCAAGACCAAGATTACGATTATCTGAACGAGTGGGG | |
| | CAGCCGCTTCAAGAAGCTGGCAGACATGTACGGTGGCGGGGAGGACGACTAGGCGGCCTGCCTGCAGGGC | |
| | TGGGGACCAAACGTCAGGCCACAGAGCATCTCCAAGGGGTCTCAGTTCCCCCTTCAGCTGAGGACTTCGG | |
| | AGCTTGTCAGGAAGTGGCCGTAGCAACTTGGCGGAGACAGGCTATGAGTCTGACGTTAGAGTGGTGGCTT | |
| | CCTTAGCCTTTCAGGATGGAGGAATGTGGGCAGTTTGACTTCAGCACTGAAAACCTCTCCACCTGGGCCA | |
| | GGGTTGCCTCAGAGGCCAAGTTTCCAGAAGCCTCTTACCTGCCGTAAAATGCTCAACCCTGTGTCCTGGG | |
| | CCTGGGCCTGCTGTGACTGACCTACAGTGGACTTTCTCTCTGGAATGGAACCTTCTTAGGCCTCCTGGTG | |
| | CAACTTAATTTTTTTTTTTAATGCTATCTTCAAAACGTTAGAGAAAGTTCTTCAAAAGTGCAGCCCAGAG | |
| | CTGCTGGGCCCACTGGCCGTCCTGCATTTCTGGTTTCCAGACCCCAATGCCTCCCATTCGGATGGATCTC | |
| | TGCGTTTTTATACTGAGTGTGCCTAGGTTGCCCCTTATTTTTTATTTTCCCTGTTGCGTTGCTATAGATG | |
| | AAGGGTGAGGACAATCGTGTATATGTACTAGAACTTTTTTATTAAAGAAACTTTTCCCAGAGGTGCCTGG | |
| | GGAGTG | |
| GSTM3 | GGTTGGTTCTGAGAAGGCTTCAAGGAATAGGCAGACATTTCAGCAAGGCTGCTGAGGAAGGATAGGCTGT | 192 |
| NM_000849.4 | GGAAATTAGGATGCAGCACTCCTGCCCGGGTCCCGCCTCGGGGTCGCCAGGCCCTGAACCCCAACGCCGG | |
| | CATTAGTCGCGCCTGCGCACGGCCCTGTGGAGCCGCGGAGGCAAGGGACGGAGAACGGGGCGGAGGCGGA | |
| | GTCAGGGCGCCCGCGCGTGGGCCCCGCCCCCTTATGTCGGGTATAAAGCCCCTCCCGCTCACAGTTTCCC | |
| | TAGTCCTCGAAGGCTCGGAAGCCCGTCACCATGTCGTGCGAGTCGTCTATGGTTCTCGGGTACTGGGATA | |
| | TTCGTGGGCTGGCGCACGCCATCCGCCTGCTCCTGGAGTTCACGGATACCTCTTATGAGGAGAAACGGTA | |
| | CACGTGCGGGGAAGCTCCTGACTATGATCGAAGCCAATGGCTGGATGTGAAATTCAAGCTAGACCTGGAC | |
| | TTTCCTAATCTGCCCTACCTCCTGGATGGGAAGAACAAGATCACCCAGAGCAATGCCATCTTGCGCTACA | |
| | TCGCTCGCAAGCACAACATGTGTGGTGAGACTGAAGAAGAAAAGATTCGAGTGGACATCATAGAGAACCA | |
| | AGTAATGGATTTCCGCACACAACTGATAAGGCTCTGTTACAGCTCTGACCACGAAAAACTGAAGCCTCAG | |
| | TACTTGGAAGAGCTACCTGGACAACTGAAACAATTCTCCATGTTTCTGGGGAAATTCTCATGGTTTGCCG | |
| | GGGAAAAGCTCACCTTTGTGGATTTTCTCACCTATGATATCTTGGATCAGAACCGTATATTTGACCCCAA | |
| | GTGCCTGGATGAGTTCCCAAACCTGAAGGCTTTCATGTGCCGTTTTGAGGCTTTGGAGAAAATCGCTGCC | |
| | TACTTACAGTCTGATCAGTTCTGCAAGATGCCCATCAACAACAAGATGGCCCAGTGGGGCAACAAGCCTG | |
| | TATGCTGAGCAGGAGGCAGACTTGCAGAGCTTGTTTTGTTTCATCCTGTCCGTAAGGGGTCAGCGCTCTT | |
| | GCTTTGCTCTTTTCAATGAATAGCACTTATGTTACTGGTGTCCAGCTGAGTTTCTCTTGGGTATAAAGGC | |
| | TAAAAGGGAAAAAGGATATGTGGAGAATCATCAAGATATGAATTGAATCGCTGCGATACTGGCATTTCCC | |
| | TACTCCCCAACTGAGTTCAAGGGCTGTAGGTTCATGCCCAAGCCCTGAGAGTGGGTACTAGAAAAAACGA | |
| | GATTGCACAGTTGGAGAGAGCAGGTGTGTTAAATGGGACTGGAGTCCCTGTGAAGACTGGGTGAGGATAA | |
| | CACAAGTAAAACTGTGGTACTGATGGACTTAACCGGAGTTCGGAAACCGTCCTGTGTACACATGGGAGTT | |
| | TAGTGTGATAAAGGCAGTATTTCAGACTGGTGGGCTAGCCAATAGAGTTGGGACAATTGCTTACTCATTA | |
| | AAAATAATAGAGCCCCACTTGACACTATTCACTAAAATTAATCTGGAATTTAAGGCCCAACATTAAACAC | |
| | AAAGCTGTTGAAATATTGATGAAAATGTAAGAATTTTTGTGACCACGGGGTAGGAGAAGTTTCTTTAAAG | |
| | ACGTAAAAAGAAAAAAACCATAGGCTGCTCTGCCTGTGGAGTAGCCATTCTTTATTCTTTTACTTTTTAA | |
| | AATAATAACAATCACAAAGGAAAGATTTGCCAATTGAATAGGATCAAATTCTACAACTTTTCCTAAGGCA | |
| | CCCACAAATAAATGACAAGTGAGACAAAAAGCACTAGTATAAAGATTATATAAAGACCTATAAATCATTA | |
| | AGACAACTGAGTTTTTAAAAATGGACAAAATCCATGAACAATTTATAAAATAGAAATATAGCCAAAAATG | |
| | TCTAAAAGATGTTTATGATGTAAGGAATTATCAATTACAACAGTGAGAAACCATATTTCCTTCTATCCGA | |
| | TGAGTAAAAAGTTTCTAAAGTGTTGGCAAGGCTTAGGAAAGTGATATGCATTTCCTGCTGGTCAAGTTGT | |
| | AAATTAGTATAGCTACTTTGGAGGACAATTGTAAAATTTAAATCATATCCTATGACCCAGCAATTCCATG | |
| | CTATAAAAACTCATCCATGGCCGGGCTTGGTGGCTCACGCCTGTAATCCCAGCACTTTGGGAGGCTGAGG | |
| | TGGGCAGATCACGAGGTCAAGAGATCGAGACCATCCTGGCCAACATGATGAAACCCCGTTTCTACTAAAA | |
| | ATACAAAAATTAGCTGGGCATGGTGGCATGTGCCTATAGTCCCAGCTACTCAGGAGGCTGAGGCAGGAGA | |
| | ATTGCTTGAACCTGGGAGGCAGAGGTTGCAGTGAGCCGAGATCACGCCACTGCACTCCAGCCTGGCTACA | |
| | GGGCGAGACTCTGTCTCAAAAAAAAAAAAAAAAAAAAAAAAAAAACATTCAAAGAGACATATACTAAGAT | |
| | GTTCACTGTGGCATTGTCTGTAATGACAAATAAGTGGAAACCGTGTAAATACCTGTCAATACTATGGAGT | |
| | ACCATGTGGCAACGGAAGAATGAGACTGAACTGTGTGAACTAACATGCAAAGATCCCCAAAACAGGCCAG | |
| | GTGTGGTTGCTCACAGCTGTAATAACAACACCTTCAGAGGCTGAGGTGAGAGGATCAGTTGAGGCCAGGA | |
| | GTTTAAGACCAGCCTGGGCAACATAGTGAGACCCCTGTCTCCCAAAAATTTTTTTTAATTAGCTGTGCGC | |
| | AATTGCTCATGCATAGTCCCAGCTACCCAGGAGGCTGAGGTGGGAGGATCACTTGAGCCCAGGAATTTGA | |
| | AGCTGCAGTGAGCTGTGTTCTTGCCACTGCACTCCAATCTGGGTGACTGAGCAAGACCCTGTCTCTTAAA | |
| | AAAATAAAAAAGATCTCCAAGCATAGAGAAGAGTCTGGAGGGAAACACCAAACTCATAACAGTCTTACTG | |
| | CAGGCAAGTGGGATAAAGGCCCAGACTCCATGGTGGAAGTTAAAGGGCATTTCCAAGTTAAGGCTAAGAC | |
| | TTGCTTTTCTAACTAAGAGAATGTGCTCATGCATTGCTTGTGTAGTAGAAACTAGTTTTTAGAAAAGAAA | |
| | GCAAACTTAAGAAACACTGACTCCTGTGGAGATGACTTGGCACCACTCTCCTTTCACAGAGCAGAGTCTG | |
| | AATAGTCTTCAGAGATAGGCCTGTGGGCCAGATTGCCATCCCCTATGGACCAGAAGCCAAGGATCTCTCT | |
| | AGTGATGGTCAGAGGGCCCAAATGGCAGGGATACCCAGTGATGTCAGGAGGAATAGTACAGACAGAAGGT | |
| | GCTAAGCAGACAATTCAACTGCCATGTTTTGCCACCCCCTGTGAGCAGGGATTAGGTGTTCAGGCCAGTA | |
| | TCTTGGGCATGGGGGAGCCTTTGGCCAGAAGAGGTATAAAGCTCAGAAGTTTTTCAGTCTGATAACTATT | |
| | GATATAATTTCCATAGTGTGAGGGAGCGGTATGCTCTACCCTTGTGTATTTAAGGCAGGACAGAGAAATT | |
| | GAGGATGCCCCTGGGGCTAGATCGATGATATGACCAGAAATCAAAAAGGGAATGCATTATTTATTGCTGT | |
| | GTAACACTGTTAAGAGAGGAGGTAGTTAAGGGATGGATAGGCACATAGAGAGGGAAGGTCTCAGGAGAAG | |
| | GGATAGAAAGGAACTATGTTCACAAGAACAACGGCAAGACAGTGCCTATACTGCCTCTACAGTTAATAGG | |
| | AAAAACGGAAGAAGTTACCCTTAAGCTAGGATGTTGCTCAGAAGTGACCATCCCAACTTTGGTGCGGGCA | |
| | CAATAAATCAGCCTAAATGTCCCTAATTTAACCCAGCTCATTATAATGTCATTAAACATGACATTAGCAT | |
| | TGTGGTTTTAGCACCCCCATGGGTTTTGCTTAGGCACTCATGGGTAATAACCAAGATGGAGTCCCTTTGG | |
| | CAAAACTTAGGCATGCACAGCTGTAGTACCCCAAGAAGAAAATGTTACTTCTCTCATCTGGGCAAAACCC | |
| | ACAGAAGACTTCCCAGCTTCTGCCACATAAAAGACACAGAACACAGACGCCTTACTGGCAACCTGCTTTC | |
| | AAGACCCCTGTCTTTGCTGAGAGCTTTCCTTTTTCCCAATAAATTCTACTCTGCCCTACTCACTCTCAAA | |
| | AAAAAAAAAAAAAA | |
| TP53BP2 | GCTGGGGCCCGACCCGGGATTAGTTGGTTTCGGAGCGGAGGAGGGAGCCCCGACCGTCACGAGCGTCGAA | 193 |
| NM_001031685.2 | GAGACAAAGCCGCGTCAGGGGGCCCGGCCGGGGCGGGGGAGCCCGGGGCTTGTTGGTGCCCCAGCCCGCG | |
| | CGGAGGGCCCTTCGGACCCGCGCGCCGCCGCTGCCGCCGCCGCCGCCTCGCAACAGGTCCGGGCGGCCTC | |
| | GCTCTCCGCTCCCCTCCCCCGCATCCGCGACCCTCCGGGGCACCTCAGCTCGGCCGGGGCCGCAGTCTGG | |
| | CCACCCGCTTCCATGCGGTTCGGGTCCAAGATGATGCCGATGTTTCTTACCGTGTATCTCAGTAACAATG | |
| | AGCAGCACTTCACAGAAGTTCCAGTTACTCCAGAAACAATATGCAGAGACGTGGTGGATCTGTGCAAAGA | |
| | ACCCGGCGAGAGTGATTGCCATTTGGCTGAAGTGTGGTGTGGCTCTGAACGTCCAGTTGCGGATAATGAG | |
| | CGAATGTTTGATGTTCTTCAACGATTTGGAAGTCAGAGGAACGAAGTTCGCTTCTTCCTTCGTCATGAAC | |
| | GCCCCCCTGGCAGGGACATTGTGAGTGGACCAAGATCTCAGGATCCAAGTTTAAAAAGAAATGGTGTAAA | |
| | AGTTCCTGGTGAATATCGAAGAAAGGAGAACGGTGTTAATAGTCCTAGGATGGATCTGACTCTTGCTGAA | |
| | CTTCAGGAAATGGCATCTCGCCAGCAGCAACAGATTGAAGCCCAGCAACAATTGCTGGCAACTAAGGAAC | |
| | AGCGCTTAAAGTTTTTGAAACAACAAGATCAGCGACAACAGCAACAAGTTGCTGAGCAGGAGAAACTTAA | |
| | AAGGCTAAAAGAAATAGCTGAGAATCAGGAAGCTAAGCTAAAAAAAGTGAGAGCACTTAAAGGCCACGTG | |
| | GAACAGAAGAGACTAAGCAATGGGAAACTTGTGGAGGAAATTGAACAGATGAATAATTTGTTCCAGCAAA | |
| | AACAGAGGGAGCTCGTCCTGGCTGTGTCAAAAGTAGAAGAACTGACCAGGCAGCTAGAGATGCTCAAGAA | |
| | CGGCAGGATCGACAGCCACCATGACAATCAGTCTGCAGTGGCTGAGCTTGATCGCCTCTATAAGGAGCTG | |
| | CAGCTAAGAAACAAATTGAATCAAGAGCAGAATGCCAAGCTACAACAACAGAGGGAGTGTTTGAATAAGC | |
| | GTAATTCAGAAGTGGCAGTCATGGATAAGCGTGTTAATGAGCTGAGGGACCGGCTGTGGAAGAAGAAGGC | |
| | AGCTCTACAGCAAAAAGAAAATCTACCAGTTTCATCTGATGGAAATCTTCCCCAGCAAGCCGCGTCAGCC | |
| | CCAAGCCGTGTGGCTGCAGTAGGTCCCTATATCCAGTCGTCTACTATGCCTCGGATGCCCTCAAGGCCTG | |
| | AATTGCTGGTGAAGCCAGCCCTGCCGGATGGTTCCTTGGTCATTCAGGCTTCAGAGGGGCCGATGAAAAT | |
| | ACAGACACTGCCCAACATGAGATCTGGGGCTGCTTCACAAACTAAAGGCTCTAAAATCCATCCAGTTGGC | |
| | CCTGATTGGAGTCCTTCAAATGCAGATCTTTTCCCAAGCCAAGGCTCTGCTTCTGTACCTCAAAGCACTG | |
| | GGAATGCTCTGGATCAAGTTGATGATGGAGAGGTTCCGCTGAGGGAGAAAGAGAAGAAAGTGCGTCCGTT | |
| | CTCAATGTTTGATGCAGTAGACCAGTCCAATGCCCCACCTTCCTTTGGTACTCTGAGGAAGAACCAGAGC | |
| | AGTGAAGATATCTTGCGGGATGCTCAGGTTGCAAATAAAAATGTGGCTAAAGTACCACCTCCTGTTCCTA | |
| | CAAAACCAAAACAGATTAATTTGCCTTATTTTGGACAAACTAATCAGCCACCTTCAGACATTAAGCCAGA | |
| | CGGAAGTTCTCAGCAGTTGTCAACAGTTGTTCCGTCCATGGGAACTAAACCAAAACCAGCAGGGCAGCAG | |
| | CCGAGAGTGCTGCTATCTCCCAGCATACCTTCGGTTGGCCAAGACCAGACCCTTTCTCCAGGTTCTAAGC | |
| | AAGAAAGTCCACCTGCTGCTGCCGTCCGGCCCTTTACTCCCCAGCCTTCCAAAGACACCTTACTTCCACC | |
| | CTTCAGAAAACCCCAGACCGTGGCAGCAAGTTCAATATATTCCATGTATACGCAACAGCAGGCGCCAGGA | |
| | AAAAACTTCCAGCAGGCTGTGCAGAGCGCGTTGACCAAGACTCATACCAGAGGGCCACACTTTTCAAGTG | |
| | TATATGGTAAGCCTGTAATTGCTGCTGCCCAGAATCAACAGCAGCACCCAGAGAACATTTATTCCAATAG | |
| | CCAGGGCAAGCCTGGCAGTCCAGAACCTGAAACAGAGCCTGTTTCTTCAGTTCAGGAGAACCATGAAAAC | |
| | GAAAGAATTCCTCGGCCACTCAGCCCAACTAAATTACTGCCTTTCTTATCTAATCCTTACCGAAACCAGA | |
| | GTGATGCTGACCTAGAAGCCTTACGAAAGAAACTGTCTAACGCACCAAGGCCTCTAAAGAAACGTAGTTC | |
| | TATTACAGAGCCAGAGGGTCCTAATGGGCCAAATATTCAGAAGCTTTTATATCAGAGGACCACCATAGCG | |
| | GCCATGGAGACCATCTCTGTCCCATCATACCCATCCAAGTCAGCTTCTGTGACTGCCAGCTCAGAAAGCC | |
| | CAGTAGAAATCCAGAATCCATATTTACATGTGGAGCCCGAAAAGGAGGTGGTCTCTCTGGTTCCTGAATC | |
| | ATTGTCCCCAGAGGATGTGGGGAATGCCAGTACAGAGAACAGTGACATGCCAGCTCCTTCTCCAGGCCTT | |
| | GATTATGAGCCTGAGGGAGTCCCAGACAACAGCCCAAATCTCCAGAATAACCCAGAAGAACCAAATCCAG | |
| | AGGCTCCACATGTGCTTGATGTGTACCTGGAGGAGTACCCTCCATACCCACCCCCACCATACCCATCTGG | |
| | GGAGCCTGAAGGGCCCGGAGAAGACTCGGTGAGCATGCGCCCGCCTGAAATCACCGGGCAGGTCTCTCTG | |
| | CCTCCTGGTAAAAGGACAAACTTGCGTAAAACTGGCTCAGAGCGTATCGCTCATGGAATGAGGGTGAAAT | |
| | TCAACCCCCTTGCTTTACTGCTAGATTCGTCTTTGGAGGGAGAATTTGACCTTGTACAGAGAATTATTTA | |
| | TGAGGTTGATGACCCAAGCCTCCCCAATGATGAAGGCATCACGGCTCTTCACAATGCTGTGTGTGCAGGC | |
| | CACACAGAAATCGTTAAGTTCCTGGTACAGTTTGGTGTAAATGTAAATGCTGCTGATAGTGATGGATGGA | |
| | CTCCATTACATTGTGCTGCCTCATGTAACAACGTCCAAGTGTGTAAGTTTTTGGTGGAGTCAGGAGCCGC | |
| | TGTGTTTGCCATGACCTACAGTGACATGCAGACTGCTGCAGATAAGTGCGAGGAAATGGAGGAAGGCTAC | |
| | ACTCAGTGCTCCCAATTTCTTTATGGAGTTCAGGAGAAGATGGGCATAATGAATAAAGGAGTCATTTATG | |
| | CGCTTTGGGATTATGAACCTCAGAATGATGATGAGCTGCCCATGAAAGAAGGAGACTGCATGACAATCAT | |
| | CCACAGGGAAGACGAAGATGAAATCGAATGGTGGTGGGCGCGCCTTAATGATAAGGAGGGATATGTTCCA | |
| | CGTAACTTGCTGGGACTGTACCCAAGAATTAAACCAAGACAAAGGAGCTTGGCCTGAAACTTCCACACAG | |
| | AATTTTAGTCAATGAAGAATTAATCTCTGTTAAGAAGAAGTAATACGATTATTTTTGGCAAAAATTTCAC | |
| | AAGACTTATTTTAATGACAATGTAGCTTGAAAGCGATGAAGAATGTCTCTAGAAGAGAATGAAGGATTGA | |
| | AGAATTCACCATTAGAGGACATTTAGCGTGATGAAATAAAGCATCTACGTCAGCAGGCCATACTGTGTTG | |
| | GGGCAAAGGTGTCCCGTGTAGCACTCAGATAAGTATACAGCGACAATCCTGTTTTCTACAAGAATCCTGT | |
| | CTAGTAAATAGGATCATTTATTGGGCAGTTGGGAAATCAGCTCTCTGTCCTGTTGAGTGTTTTCAGCAGC | |
| | TGCTCCTAAACCAGTCCTCCTGCCAGAAAGGACCAGTGCCGTCACATCGCTGTCTCTGATTGTCCCCGGC | |
| | ACCAGCAGGCCCTTGGGGGGCTCACCTGAAGGCTCGAAGGCACTGCACACTTGTATATTGTCAGTGAAGA | |
| | ACTGTTAGTTGGTTGTCAGTGAACAATAACTTTATTATATGAGTTTTTGTAGCATCTTAAGAATTATACA | |
| | TATGTTTGAAATATTGAAACTAAGCTACGGTACCAGTAATTAGATGTAGAATCTTGTTTGTAGGCTGAAT | |
| | TTTAATCTGTATTTATTGTCTTTTGTATCTCAGAAATTAGAAACTTGCTACAGACTTACCCGTAATATTT | |
| | GTCAAGATCATAGCTGACTTTAAAAACAGTTGTAATAAACTTTTTGATGCTAGCTGTTTACTGGTTTTTG | |
| | TTTTTGATGTCATAAATAGACCTTGTTTAATAGTCACAAGCCGTTGGGATATCATACCCAGCTGAAAAAG | |
| | AACAAACTGCTTAACATAAGTATATGTATCGTAATAAGAGTTTTTTACCAGCTAAGTGATTCAATGTAAG | |
| | TGGTTTTTAAAATAAAATACTGTAGAGATCATGGTGAAAAAAAAAAAAAA | |
| CENPF | GAGACCAGAAGCGGGCGAATTGGGCACCGGTGGCGGCTGCGGGCAGTTTGAATTAGACTCTGGGCTCCAG | 194 |
| NM_016343.3 | CCCGCCGAAGCCGCGCCAGAACTGTACTCTCCGAGAGGTCGTTTTCCCGTCCCCGAGAGCAAGTTTATTT | |
| | ACAAATGTTGGAGTAATAAAGAAGGCAGAACAAAATGAGCTGGGCTTTGGAAGAATGGAAAGAAGGGCTG | |
| | CCTACAAGAGCTCTTCAGAAAATTCAAGAGCTTGAAGGACAGCTTGACAAACTGAAGAAGGAAAAGCAGC | |
| | AAAGGCAGTTTCAGCTTGACAGTCTCGAGGCTGCGCTGCAGAAGCAAAAACAGAAGGTTGAAAATGAAAA | |
| | AACCGAGGGTACAAACCTGAAAAGGGAGAATCAAAGATTGATGGAAATATGTGAAAGTCTGGAGAAAACT | |
| | AAGCAGAAGATTTCTCATGAACTTCAAGTCAAGGAGTCACAAGTGAATTTCCAGGAAGGACAACTGAATT | |
| | CAGGCAAAAAACAAATAGAAAAACTGGAACAGGAACTTAAAAGGTGTAAATCTGAGCTTGAAAGAAGCCA | |
| | ACAAGCTGCGCAGTCTGCAGATGTCTCTCTGAATCCATGCAATACACCACAAAAAATTTTTACAACTCCA | |
| | CTAACACCAAGTCAATATTATAGTGGTTCCAAGTATGAAGATCTAAAAGAAAAATATAATAAAGAGGTTG | |
| | AAGAACGAAAAAGATTAGAGGCAGAGGTTAAAGCCTTGCAGGCTAAAAAAGCAAGCCAGACTCTTCCACA | |
| | AGCCACCATGAATCACCGCGACATTGCCCGGCATCAGGCTTCATCATCTGTGTTCTCATGGCAGCAAGAG | |
| | AAGACCCCAAGTCATCTTTCATCTAATTCTCAAAGAACTCCAATTAGGAGAGATTTCTCTGCATCTTACT | |
| | TTTCTGGGGAACAAGAGGTGACTCCAAGTCGATCAACTTTGCAAATAGGGAAAAGAGATGCTAATAGCAG | |
| | TTTCTTTGACAATTCTAGCAGTCCTCATCTTTTGGATCAATTAAAAGCGCAGAATCAAGAGCTAAGAAAC | |
| | AAGATTAATGAGTTGGAACTACGCCTGCAAGGACATGAAAAAGAAATGAAAGGCCAAGTGAATAAGTTTC | |
| | AAGAACTCCAACTCCAACTGGAGAAAGCAAAAGTGGAATTAATTGAAAAAGAGAAAGTTTTGAACAAATG | |
| | TAGGGATGAACTAGTGAGAACAACAGCACAATACGACCAGGCGTCAACCAAGTATACTGCATTGGAACAA | |
| | AAACTGAAAAAATTGACGGAAGATTTGAGTTGTCAGCGACAAAATGCAGAAAGTGCCAGATGTTCTCTGG | |
| | AACAGAAAATTAAGGAAAAAGAAAAGGAGTTTCAAGAGGAGCTCTCCCGTCAACAGCGTTCTTTCCAAAC | |
| | ACTGGACCAGGAGTGCATCCAGATGAAGGCCAGACTCACCCAGGAGTTACAGCAAGCCAAGAATATGCAC | |
| | AACGTCCTGCAGGCTGAACTGGATAAACTCACATCAGTAAAGCAACAGCTAGAAAACAATTTGGAAGAGT | |
| | TTAAGCAAAAGTTGTGCAGAGCTGAACAGGCGTTCCAGGCGAGTCAGATCAAGGAGAATGAGCTGAGGAG | |
| | AAGCATGGAGGAAATGAAGAAGGAAAACAACCTCCTTAAGAGTCACTCTGAGCAAAAGGCCAGAGAAGTC | |
| | TGCCACCTGGAGGCAGAACTCAAGAACATCAAACAGTGTTTAAATCAGAGCCAGAATTTTGCAGAAGAAA | |
| | TGAAAGCGAAGAATACCTCTCAGGAAACCATGTTAAGAGATCTTCAAGAAAAAATAAATCAGCAAGAAAA | |
| | CTCCTTGACTTTAGAAAAACTGAAGCTTGCTGTGGCTGATCTGGAAAAGCAGCGAGATTGTTCTCAAGAC | |
| | CTTTTGAAGAAAAGAGAACATCACATTGAACAACTTAATGATAAGTTAAGCAAGACAGAGAAAGAGTCCA | |
| | AAGCCTTGCTGAGTGCTTTAGAGTTAAAAAAGAAAGAATATGAAGAATTGAAAGAAGAGAAAACTCTGTT | |
| | TTCTTGTTGGAAAAGTGAAAACGAAAAACTTTTAACTCAGATGGAATCAGAAAAGGAAAACTTGCAGAGT | |
| | AAAATTAATCACTTGGAAACTTGTCTGAAGACACAGCAAATAAAAAGTCATGAATACAACGAGAGAGTAA | |
| | GAACGCTGGAGATGGACAGAGAAAACCTAAGTGTCGAGATCAGAAACCTTCACAACGTGTTAGACAGTAA | |
| | GTCAGTGGAGGTAGAGACCCAGAAACTAGCTTATATGGAGCTACAGCAGAAAGCTGAGTTCTCAGATCAG | |
| | AAACATCAGAAGGAAATAGAAAATATGTGTTTGAAGACTTCTCAGCTTACTGGGCAAGTTGAAGATCTAG | |
| | AACACAAGCTTCAGTTACTGTCAAATGAAATAATGGACAAAGACCGGTGTTACCAAGACTTGCATGCCGA | |
| | ATATGAGAGCCTCAGGGATCTGCTAAAATCCAAAGATGCTTCTCTGGTGACAAATGAAGATCATCAGAGA | |
| | AGTCTTTTGGCTTTTGATCAGCAGCCTGCCATGCATCATTCCTTTGCAAATATAATTGGAGAACAAGGAA | |
| | GCATGCCTTCAGAGAGGAGTGAATGTCGTTTAGAAGCAGACCAAAGTCCGAAAAATTCTGCCATCCTACA | |
| | AAATAGAGTTGATTCACTTGAATTTTCATTAGAGTCTCAAAAACAGATGAACTCAGACCTGCAAAAGCAG | |
| | TGTGAAGAGTTGGTGCAAATCAAAGGAGAAATAGAAGAAAATCTCATGAAAGCAGAACAGATGCATCAAA | |
| | GTTTTGTGGCTGAAACAAGTCAGCGCATTAGTAAGTTACAGGAAGACACTTCTGCTCACCAGAATGTTGT | |
| | TGCTGAAACCTTAAGTGCCCTTGAGAACAAGGAAAAAGAGCTGCAACTTTTAAATGATAAGGTAGAAACT | |
| | GAGCAGGCAGAGATTCAAGAATTAAAAAAGAGCAACCATCTACTTGAAGACTCTCTAAAGGAGCTACAAC | |
| | TTTTATCCGAAACCCTAAGCTTGGAGAAGAAAGAAATGAGTTCCATCATTTCTCTAAATAAAAGGGAAAT | |
| | TGAAGAGCTGACCCAAGAGAATGGGACTCTTAAGGAAATTAATGCATCCTTAAATCAAGAGAAGATGAAC | |
| | TTAATCCAGAAAAGTGAGAGTTTTGCAAACTATATAGATGAAAGGGAGAAAAGCATTTCAGAGTTATCTG | |
| | ATCAGTACAAGCAAGAAAAACTTATTTTACTACAAAGATGTGAAGAAACCGGAAATGCATATGAGGATCT | |
| | TAGTCAAAAATACAAAGCAGCACAGGAAAAGAATTCTAAATTAGAATGCTTGCTAAATGAATGCACTAGT | |
| | CTTTGTGAAAATAGGAAAAATGAGTTGGAACAGCTAAAGGAAGCATTTGCAAAGGAACACCAAGAATTCT | |
| | TAACAAAATTAGCATTTGCTGAAGAAAGAAATCAGAATCTGATGCTAGAGTTGGAGACAGTGCAGCAAGC | |
| | TCTGAGATCTGAGATGACAGATAACCAAAACAATTCTAAGAGCGAGGCTGGTGGTTTAAAGCAAGAAATC | |
| | ATGACTTTAAAGGAAGAACAAAACAAAATGCAAAAGGAAGTTAATGACTTATTACAAGAGAATGAACAGC | |
| | TGATGAAGGTAATGAAGACTAAACATGAATGTCAAAATCTAGAATCAGAACCAATTAGGAACTCTGTGAA | |
| | AGAAAGAGAGAGTGAGAGAAATCAATGTAATTTTAAACCTCAGATGGATCTTGAAGTTAAAGAAATTTCT | |
| | CTAGATAGTTATAATGCGCAGTTGGTGCAATTAGAAGCTATGCTAAGAAATAAGGAATTAAAACTTCAGG | |
| | AAAGTGAGAAGGAGAAGGAGTGCCTGCAGCATGAATTACAGACAATTAGAGGAGATCTTGAAACCAGCAA | |
| | TTTGCAAGACATGCAGTCACAAGAAATTAGTGGCCTTAAAGACTGTGAAATAGATGCGGAAGAAAAGTAT | |
| | ATTTCAGGGCCTCATGAGTTGTCAACAAGTCAAAACGACAATGCACACCTTCAGTGCTCTCTGCAAACAA | |
| | CAATGAACAAGCTGAATGAGCTAGAGAAAATATGTGAAATACTGCAGGCTGAAAAGTATGAACTCGTAAC | |
| | TGAGCTGAATGATTCAAGGTCAGAATGTATCACAGCAACTAGGAAAATGGCAGAAGAGGTAGGGAAACTA | |
| | CTAAATGAAGTTAAAATATTAAATGATGACAGTGGTCTTCTCCATGGTGAGTTAGTGGAAGACATACCAG | |
| | GAGGTGAATTTGGTGAACAACCAAATGAACAGCACCCTGTGTCTTTGGCTCCATTGGACGAGAGTAATTC | |
| | CTACGAGCACTTGACATTGTCAGACAAAGAAGTTCAAATGCACTTTGCCGAATTGCAAGAGAAATTCTTA | |
| | TCTTTACAAAGTGAACACAAAATTTTACATGATCAGCACTGTCAGATGAGCTCTAAAATGTCAGAGCTGC | |
| | AGACCTATGTTGACTCATTAAAGGCCGAAAATTTGGTCTTGTCAACGAATCTGAGAAACTTTCAAGGTGA | |
| | CTTGGTGAAGGAGATGCAGCTGGGCTTGGAGGAGGGGCTCGTTCCATCCCTGTCATCCTCTTGTGTGCCT | |
| | GACAGCTCTAGTCTTAGCAGTTTGGGAGACTCCTCCTTTTACAGAGCTCTTTTAGAACAGACAGGAGATA | |
| | TGTCTCTTTTGAGTAATTTAGAAGGGGCTGTTTCAGCAAACCAGTGCAGTGTAGATGAAGTATTTTGCAG | |
| | CAGTCTGCAGGAGGAGAATCTGACCAGGAAAGAAACCCCTTCGGCCCCAGCGAAGGGTGTTGAAGAGCTT | |
| | GAGTCCCTCTGTGAGGTGTACCGGCAGTCCCTCGAGAAGCTAGAAGAGAAAATGGAAAGTCAAGGGATTA | |
| | TGAAAAATAAGGAAATTCAAGAGCTCGAGCAGTTATTAAGTTCTGAAAGGCAAGAGCTTGACTGCCTTAG | |
| | GAAGCAGTATTTGTCAGAAAATGAACAGTGGCAACAGAAGCTGACAAGCGTGACTCTGGAGATGGAGTCC | |
| | AAGTTGGCGGCAGAAAAGAAACAGACGGAACAACTGTCACTTGAGCTGGAAGTAGCACGACTCCAGCTAC | |
| | AAGGTCTGGACTTAAGTTCTCGGTCTTTGCTTGGCATCGACACAGAAGATGCTATTCAAGGCCGAAATGA | |
| | GAGCTGTGACATATCAAAAGAACATACTTCAGAAACTACAGAAAGAACACCAAAGCATGATGTTCATCAG | |
| | ATTTGTGATAAAGATGCTCAGCAGGACCTCAATCTAGACATTGAGAAAATAACTGAGACTGGTGCAGTGA | |
| | AACCCACAGGAGAGTGCTCTGGGGAACAGTCCCCAGATACCAATTATGAGCCTCCAGGGGAAGATAAAAC | |
| | CCAGGGCTCTTCAGAATGCATTTCTGAATTGTCATTTTCTGGTCCTAATGCTTTGGTACCTATGGATTTC | |
| | CTGGGGAATCAGGAAGATATCCATAATCTTCAACTGCGGGTAAAAGAGACATCAAATGAGAATTTGAGAT | |
| | TACTTCATGTGATAGAGGACCGTGACAGAAAAGTTGAAAGTTTGCTAAATGAAATGAAAGAATTAGACTC | |
| | AAAACTCCATTTACAGGAGGTACAACTAATGACCAAAATTGAAGCATGCATAGAATTGGAAAAAATAGTT | |
| | GGGGAACTTAAGAAAGAAAACTCAGATTTAAGTGAAAAATTGGAATATTTTTCTTGTGATCACCAGGAGT | |
| | TACTCCAGAGAGTAGAAACTTCTGAAGGCCTCAATTCTGATTTAGAAATGCATGCAGATAAATCATCACG | |
| | TGAAGATATTGGAGATAATGTGGCCAAGGTGAATGACAGCTGGAAGGAGAGATTTCTTGATGTGGAAAAT | |
| | GAGCTGAGTAGGATCAGATCGGAGAAAGCTAGCATTGAGCATGAAGCCCTCTACCTGGAGGCTGACTTAG | |
| | AGGTAGTTCAAACAGAGAAGCTATGTTTAGAAAAAGACAATGAAAATAAGCAGAAGGTTATTGTCTGCCT | |
| | TGAAGAAGAACTCTCAGTGGTCACAAGTGAGAGAAACCAGCTTCGTGGAGAATTAGATACTATGTCAAAA | |
| | AAAACCACGGCACTGGATCAGTTGTCTGAAAAAATGAAGGAGAAAACACAAGAGCTTGAGTCTCATCAAA | |
| | GTGAGTGTCTCCATTGCATTCAGGTGGCAGAGGCAGAGGTGAAGGAAAAGACGGAACTCCTTCAGACTTT | |
| | GTCCTCTGATGTGAGTGAGCTGTTAAAAGACAAAACTCATCTCCAGGAAAAGCTGCAGAGTTTGGAAAAG | |
| | GACTCACAGGCACTGTCTTTGACAAAATGTGAGCTGGAAAACCAAATTGCACAACTGAATAAAGAGAAAG | |
| | AATTGCTTGTCAAGGAATCTGAAAGCCTGCAGGCCAGACTGAGTGAATCAGATTATGAAAAGCTGAATGT | |
| | CTCCAAGGCCTTGGAGGCCGCACTGGTGGAGAAAGGTGAGTTCGCATTGAGGCTGAGCTCAACACAGGAG | |
| | GAAGTGCATCAGCTGAGAAGAGGCATCGAGAAACTGAGAGTTCGCATTGAGGCCGATGAAAAGAAGCAGC | |
| | TGCACATCGCAGAGAAACTGAAAGAACGCGAGCGGGAGAATGATTCACTTAAGGATAAAGTTGAGAACCT | |
| | TGAAAGGGAATTGCAGATGTCAGAAGAAAACCAGGAGCTAGTGATTCTTGATGCCGAGAATTCCAAAGCA | |
| | GAAGTAGAGACTCTAAAAACACAAATAGAAGAGATGGCCAGAAGCCTGAAAGTTTTTGAATTAGACCTTG | |
| | TCACGTTAAGGTCTGAAAAAGAAAATCTGACAAAACAAATACAAGAAAAACAAGGTCAGTTGTCAGAACT | |
| | AGACAAGTTACTCTCTTCATTTAAAAGTCTGTTAGAAGAAAAGGAGCAAGCAGAGATACAGATCAAAGAA | |
| | GAATCTAAAACTGCAGTGGAGATGCTTCAGAATCAGTTAAAGGAGCTAAATGAGGCAGTAGCAGCCTTGT | |
| | GTGGTGACCAAGAAATTATGAAGGCCACAGAACAGAGTCTAGACCCACCAATAGAGGAAGAGCATCAGCT | |
| | GAGAAATAGCATTGAAAAGCTGAGAGCCCGCCTAGAAGCTGATGAAAAGAAGCAGCTCTGTGTCTTACAA | |
| | CAACTGAAGGAAAGTGAGCATCATGCAGATTTACTTAAGGGTAGAGTGGAGAACCTTGAAAGAGAGCTAG | |
| | AGATAGCCAGGACAAACCAAGAGCATGCAGCTCTTGAGGCAGAGAATTCCAAAGGAGAGGTAGAGACCCT | |
| | AAAAGCAAAAATAGAAGGGATGACCCAAAGTCTGAGAGGTCTGGAATTAGATGTTGTTACTATAAGGTCA | |
| | GAAAAAGAAAATCTGACAAATGAATTACAAAAAGAGCAAGAGCGAATATCTGAATTAGAAATAATAAATT | |
| | CATCATTTGAAAATATTTTGCAAGAAAAAGAGCAAGAGAAAGTACAGATGAAAGAAAAATCAAGCACTGC | |
| | TCATGGAGATGCTTCAAACACAATTAAAAGAGCTCAATGAGAGAGTGGCAGCCCTGCATAATGACCAAGAA | |
| | GCCTGTAAGGCCAAAGAGCAGAATCTTAGTAGTCAAGTAGAGTGTCTTGAACTTGAGAAGGCTCAGTTGC | |
| | TACAAGGCCTTGATGAGGCCAAAAATAATTATATTGTTTTGCAATCTTCAGTGAATGGCCTCATTCAAGA | |
| | AGTAGAAGATGGCAAGCAGAAACTGGAGAAGAAGGATGAAGAAATCAGTAGACTGAAAAATCAAATTCAA | |
| | GACCAAGAGCAGCTTGTCTCTAAACTGTCCCAGGTGGAAGGAGAGCACCAACTTTGGAAGGAGCAAAACT | |
| | TAGAACTGAGAAATCTGACAGTGGAATTGGAGCAGAAGATCCAAGTGCTACAATCCAAAAATGCCTCTTT | |
| | GCAGGACACATTAGAAGTGCTGCAGAGTTCTTACAAGAATCTAGAGAATGAGCTTGAATTGACAAAAATG | |
| | GACAAAATGTCCTTTGTTGAAAAAGTAAACAAAATGACTGCAAAGGAAACTGAGCTGCAGAGGGAAATGC | |
| | ATGAGATGGCACAGAAAACAGCAGAGCTGCAAGAAGAACTCAGTGGAGAGAAAAATAGGCTAGCTGGAGA | |
| | GTTGCAGTTACTGTTGGAAGAAATAAAGAGCAGCAAAGATCAATTGAAGGAGCTCACACTAGAAAATAGT | |
| | GAATTGAAGAAGAGCCTAGATTGCATGCACAAAGACCAGGTGGAAAAGGAAGGGAAAGTGAGAGAGGAAA | |
| | TAGCTGAATATCAGCTACGGCTTCATGAAGCTGAAAAGAAACACCAGGCTTTGCTTTTGGACACAAACAA | |
| | ACAGTATGAAGTAGAAATCCAGACATACCGAGAGAAATTGACTTCTAAAGAAGAATGTCTCAGTTCACAG | |
| | AAGCTGGAGATAGACCTTTTAAAGTCTAGTAAAGAAGAGCTCAATAATTCATTGAAAGCTACTACTCAGA | |
| | TTTTGGAAGAATTGAAGAAAACCAAGATGGACAATCTAAAATATGTAAATCAGTTGAAGAAGGAAAATGA | |
| | ACGTGCCCAGGGGAAAATGAAGTTGTTGATCAAATCCTGTAAACAGCTGGAAGAGGAAAAGGAGATACTG | |
| | CAGAAAGAACTCTCTCAACTTCAAGCTGCACAGGAGAAGCAGAAAACAGGTACTGTTATGGATACCAAGG | |
| | TCGATGAATTAACAACTGAGATCAAAGAACTGAAAGAAACTCTTGAAGAAAAAACCAAGGAGGCAGATGA | |
| | ATACTTGGATAAGTACTGTTCCTTGCTTATAAGCCATGAAAAGTTAGAGAAAGCTAAAGAGATGTTAGAG | |
| | ACACAAGTGGCCCATCTGTGTTCACAGCAATCTAAACAAGATTCCCGAGGGTCTCCTTTGCTAGGTCCAG | |
| | TTGTTCCAGGACCATCTCCAATCCCTTCTGTTACTGAAAAGAGGTTATCATCTGGCCAAAATAAAGCTTC | |
| | AGGCAAGAGGCAAAGATCCAGTGGAATATGGGAGAATGGTAGAGGACCAACACCTGCTACCCCAGAGAGC | |
| | TTTTCTAAAAAAAGCAAGAAAGCAGTCATGAGTGGTATTCACCCTGCAGAAGACACGGAAGGTACTGAGT | |
| | TTGAGCCAGAGGGACTTCCAGAAGTTGTAAAGAAAGGGTTTGCTGACATCCCGACAGGAAAGACTAGCCC | |
| | ATATATCCTGCGAAGAACAACCATGGCAACTCGGACCAGCCCCCGCCTGGCTGCACAGAAGTTAGCGCTA | |
| | TCCCCACTGAGTCTCGGCAAAGAAAATCTTGCAGAGTCCTCCAAACCAACAGCTGGTGGCAGCAGATCAC | |
| | AAAAGGTCAAAGTTGCTCAGCGGAGCCCAGTAGATTCAGGCACCATCCTCCGAGAACCCACCACGAAATC | |
| | CGTCCCAGTCAATAATCTTCCTGAGAGAAGTCCGACTGACAGCCCCAGAGAGGGCCTGAGGGTCAAGCGA | |
| | GGCCGACTTGTCCCCAGCCCCAAAGCTGGACTGGAGTCCAACGGCAGTGAGAACTGTAAGGTCCAGTGAA | |
| | GGCACTTTGTGTGTCAGTACCCCTGGGAGGTGCCAGTCATTGAATAGATAAGGCTGTGCCTACAGGACTT | |
| | CTCTTTAGTCAGGGCATGCTTTATTAGTGAGGAGAAAACAATTCCTTAGAAGTCTTAAATATATTGTACT | |
| | CTTTAGATCTCCCATGTGTAGGTATTGAAAAAGTTTGGAAGCACTGATCACCTGTTAGCATTGCCATTCC | |
| | TCTACTGCAATGTAAATAGTATAAAGCTATGTATATAAAGCTTTTTGGTAATATGTTACAATTAAAATGA | |
| | CAAGCACTATATCACAATCTCTGTTTGTATGTGGGTTTTACACTAAAAAAATGCAAAACACATTTTATTC | |
| | TTCTAATTAACAGCTCCTAGGAAAATGTAGACTTTTGCTTTATGATATTCTATCTGTAGTATGAGGCATG | |
| | GAATAGTTTTGTATCGGGAATTTCTCAGAGCTGAGTAAAATGAAGGAAAAGCATGTTATGTGTTTTTAAG | |
| | GAAAATGTGCACACATATACATGTAGGAGTGTTTATCTTTCTCTTACAATCTGTTTTAGACATCTTTGCT | |
| | TATGAAACCTGTACATATGTGTGTGTGGGTATGTGTTTATTTCCAGTGAGGGCTGCAGGCTTCCTAGAGG | |
| | TGTGCTATACCATGCGTCTGTCGTTGTGCTTTTTTCTGTTTTTAGACCAATTTTTTACAGTTCTTTGGTA | |
| | AGCATTGTCGTATCTGGTGATGGATTAACATATAGCCTTTGTTTTCTAATAAAATAGTCGCCTTCGTTTT | |
| | CTGTAAAAAAAAAAAAAAAAAAAAAA | |
| TOP2A | GATTGGCTGGTCTGCTTCGGGCGGGCTAAAGGAAGGTTCAAGTGGAGCTCTCCTAACCGACGCGCGTCTG | 195 |
| NM_001067.3 | TGGAGAAGCGGCTTGGTCGGGGGTGGTCTCGTGGGGTCCTGCCTGTTTAGTCGCTTTCAGGGTTCTTGAG | |
| | CCCCTTCACGACCGTCACCATGGAAGTGTCACCATTGCAGCCTGTAAATGAAAATATGCAAGTCAACAAA | |
| | ATAAAGAAAAATGAAGATGCTAAGAAAAGACTGTCTGTTGAAAGAATCTATCAAAAGAAAACACAATTGG | |
| | AACATATTTTGCTCCGCCCAGACACCTACATTGGTTCTGTGGAATTAGTGACCCAGCAAATGTGGGTTTA | |
| | CGATGAAGATGTTGGCATTAACTATAGGGAAGTCACTTTTGTTCCTGGTTTGTACAAAATCTTTGATGAG | |
| | ATTCTAGTTAATGCTGCGGACAACAAACAAAGGGACCCAAAAATGTCTTGTATTAGAGTCACAATTGATC | |
| | CGGAAAACAATTTAATTAGTATATGGAATAATGGAAAAGGTATTCCTGTTGTTGAACACAAAGTTGAAAA | |
| | GATGTATGTCCCAGCTCTCATATTTGGACAGCTCCTAACTTCTAGTAACTATGATGATGATGAAAAGAAA | |
| | GTGACAGGTGGTCGAAATGGCTATGGAGCCAAATTGTGTAACATATTCAGTACCAAATTTACTGTGGAAA | |
| | CAGCCAGTAGAGAATACAAGAAAATGTTCAAACAGACATGGATGGATAATATGGGAAGAGCTGGTGAGAT | |
| | GGAACTCAAGCCCTTCAATGGAGAAGATTATACATGTATCACCTTTCAGCCTGATTTGTCTAAGTTTAAA | |
| | ATGCAAAGCCTGGACAAAGATATTGTTGCACTAATGGTCAGAAGAGCATATGATATTGCTGGATCCACCA | |
| | AAGATGTCAAAGTCTTTCTTAATGGAAATAAACTGCCAGTAAAAGGATTTCGTAGTTATGTGGACATGTA | |
| | TTTGAAGGACAAGTTGGATGAAACTGGTAACTCCTTGAAAGTAATACATGAACAAGTAAACCACAGGTGG | |
| | GAAGTGTGTTTAACTATGAGTGAAAAAGGCTTTCAGCAAATTAGCTTTGTCAACAGCATTGCTACATCCA | |
| | AGGGTGGCAGACATGTTGATTATGTAGCTGATCAGATTGTGACTAAACTTGTTGATGTTGTGAAGAAGAA | |
| | GAACAAGGGTGGTGTTGCAGTAAAAGCACATCAGGTGAAAAATCACATGTGGATTTTTGTAAATGCCTTA | |
| | ATTGAAAACCCAACCTTTGACTCTCAGACAAAAGAAAACATGACTTTACAACCCAAGAGCTTTGGATCAA | |
| | CATGCCAATTGAGTGAAAAATTTATCAAAGCTGCCATTGGCTGTGGTATTGTAGAAAGCATACTAAACTG | |
| | GGTGAAGTTTAAGGCCCAAGTCCAGTTAAACAAGAAGTGTTCAGCTGTAAAACATAATAGAATCAAGGGA | |
| | ATTCCCAAACTCGATGATGCCAATGATGCAGGGGGCCGAAACTCCACTGAGTGTACGCTTATCCTGACTG | |
| | AGGGAGATTCAGCCAAAACTTTGGCTGTTTCAGGCCTTGGTGTGGTTGGGAGAGACAAATATGGGGTTTT | |
| | CCCTCTTAGAGGAAAAATACTCAATGTTCGAGAAGCTTCTCATAAGCAGATCATGGAAAATGCTGAGATT | |
| | AACAATATCATCAAGATTGTGGGTCTTCAGTACAAGAAAAACTATGAAGATGAAGATTCATTGAAGACGC | |
| | TTCGTTATGGGAAGATAATGATTATGACAGATCAGGACCAAGATGGTTCCCACATCAAAGGCTTGCTGAT | |
| | TAATTTTATCCATCACAACTGGCCCTCTCTTCTGCGACATCGTTTTCTGGAGGAATTTATCACTCCCATT | |
| | GTAAAGGTATCTAAAAACAAGCAAGAAATGGCATTTTACAGCCTTCCTGAATTTGAAGAGTGGAAGAGTT | |
| | CTACTCCAAATCATAAAAAATGGAAAGTCAAATATTACAAAGGTTTGGGCACCAGCACATCAAAGGAAGC | |
| | TAAAGAATACTTTGCAGATATGAAAAGACATCGTATCCAGTTCAAATATTCTGGTCCTGAAGATGATGCT | |
| | GCTATCAGCCTGGCCTTTAGCAAAAAACAGATAGATGATCGAAAGGAATGGTTAACTAATTTCATGGAGG | |
| | ATAGAAGACAACGAAAGTTACTTGGGCTTCCTGAGGATTACTTGTATGGACAAACTACCACATATCTGAC | |
| | ATATAATGACTTCATCAACAAGGAACTTATCTTGTTCTCAAATTCTGATAACGAGAGATCTATCCCTTCT | |
| | ATGGTGGATGGTTTGAAACCAGGTCAGAGAAAGGTTTTGTTTACTTGCTTCAAACGGAATGACAAGCGAG | |
| | AAGTAAAGGTTGCCCAATTAGCTGGATCAGTGGCTGAAATGTCTTCTTATCATCATGGTGAGATGTCACT | |
| | AATGATGACCATTATCAATTTGGCTCAGAATTTTGTGGGTAGCAATAATCTAAACCTCTTGCAGCCCATT | |
| | GGTCAGTTTGGTACCAGGCTACATGGTGGCAAGGATTCTGCTAGTCCACGATACATCTTTACAATGCTCA | |
| | GCTCTTTGGCTCGATTGTTATTTCCACCAAAAGATGATCACACGTTGAAGTTTTTATATGATGACAACCA | |
| | GCGTGTTGAGCCTGAATGGTACATTCCTATTATTCCCATGGTGCTGATAAATGGTGCTGAAGGAATCGGT | |
| | ACTGGGTGGTCCTGCAAAATCCCCAACTTTGATGTGCGTGAAATTGTAAATAACATCAGGCGTTTGATGG | |
| | ATGGAGAAGAACCTTTGCCAATGCTTCCAAGTTACAAGAACTTCAAGGGTACTATTGAAGAACTGGCTCC | |
| | AAATCAATATGTGATTAGTGGTGAAGTAGCTATTCTTAATTCTACAACCATTGAAATCTCAGAGCTTCCC | |
| | GTCAGAACATGGACCCAGACATACAAAGAACAAGTTCTAGAACCCATGTTGAATGGCACCGAGAAGACAC | |
| | CTCCTCTCATAACAGACTATAGGGAATACCATACAGATACCACTGTGAAATTTGTTGTGAAGATGACTGA | |
| | AGAAAAACTGGCAGAGGCAGAGAGAGTTGGACTACACAAAGTCTTCAAACTCCAAACTAGTCTCACATGC | |
| | AACTCTATGGTGCTTTTTGACCACGTAGGCTGTTTAAAGAAATATGACACGGTGTTGGATATTCTAAGAG | |
| | ACTTTTTTGAACTCAGACTTAAATATTATGGATTAAGAAAAGAATGGCTCCTAGGAATGCTTGGTGCTGA | |
| | ATCTGCTAAACTGAATAATCAGGCTCGCTTTATCTTAGAGAAAATAGATGGCAAAATAATCATTGAAAAT | |
| | AAGCCTAAGAAAGAATTAATTAAAGTTCTGATTCAGAGGGGATATGATTCGGATCCTGTGAAGGCCTGGA | |
| | AAGAAGCCCAGCAAAAGGTTCCAGATGAAGAAGAAAATGAAGAGAGTGACAACGAAAAGGAAACTGAAAA | |
| | GAGTGACTCCGTAACAGATTCTGGACCAACCTTCAACTATCTTCTTGATATGCCCCTTTGGTATTTAACC | |
| | AAGGAAAAGAAAGATGAACTCTGCAGGCTAAGAAATGAAAAAGAACAAGAGCTGGACACATTAAAAAGAA | |
| | AGAGTCCATCAGATTTGTGGAAAGAAGACTTGGCTACATTTATTGAAGAATTGGAGGCTGTTGAAGCCAA | |
| | GGAAAAACAAGATGAACAAGTCGGACTTCCTGGGAAAGGGGGGAAGGCCAAGGGGAAAAAAACACAAATG | |
| | GCTGAAGTTTTGCCTTCTCCGCGTGGTCAAAGAGTCATTCCACGAATAACCATAGAAATGAAAGCAGAGG | |
| | CAGAAAAGAAAAATAAAAAGAAAATTAAGAATGAAAATACTGAAGGAAGCCCTCAAGAAGATGGTGTGGA | |
| | ACTAGAAGGCCTAAAACAAAGATTAGAAAAGAAACAGAAAAGAGAACCAGGTACAAAGACAAAGAAACAA | |
| | ACTACATTGGCATTTAAGCCAATCAAAAAAGGAAAGAAGAGAAATCCCTGGTCTGATTCAGAATCAGATA | |
| | GGAGCAGTGACGAAAGTAATTTTGATGTCCCTCCACGAGAAACAGAGCCACGGAGAGCAGCAACAAAAAC | |
| | AAAATTCACAATGGATTTGGATTCAGATGAAGATTTCTCAGATTTTGATGAAAAAACTGATGATGAAGAT | |
| | TTTGTCCCATCAGATGCTAGTCCACCTAAGACCAAAACTTCCCCAAAACTTAGTAACAAAGAACTGAAAC | |
| | CACAGAAAAGTGTCGTGTCAGACCTTGAAGCTGATGATGTTAAGGGCAGTGTACCACTGTCTTCAAGCCC | |
| | TCCTGCTACACATTTCCCAGATGAAACTGAAATTACAAACCCAGTTCCTAAAAAGAATGTGACAGTGAAG | |
| | AAGACAGCAGCAAAAAGTCAGTCTTCCACCTCCACTACCGGTGCCAAAAAAAGGGCTGCCCCAAAAGGAA | |
| | CTAAAAGGGATCCAGCTTTGAATTCTGGTGTCTCTCAAAAGCCTGATCCTGCCAAAACCAAGAATCGCCG | |
| | CAAAAGGAAGCCATCCACTTCTGATGATTCTGACTCTAATTTTGAGAAAATTGTTTCGAAAGCAGTCACA | |
| | AGCAAGAAATCCAAGGGGGAGAGTGATGACTTCCATATGGACTTTGACTCAGCTGTGGCTCCTCGGGCAA | |
| | AATCTGTACGGGCAAAGAAACCTATAAAGTACCTGGAAGAGTCAGATGAAGATGATCTGTTTTAAAATGT | |
| | GAGGCGATTATTTTAAGTAATTATCTTACCAAGCCCAAGACTGGTTTTAAAGTTACCTGAAGCTCTTAAC | |
| | TTCCTCCCCTCTGAATTTAGTTTGGGGAAGGTGTTTTTAGTACAAGACATCAAAGTGAAGTAAAGCCCAA | |
| | GTGTTCTTTAGCTTTTTATAATACTGTCTAAATAGTGACCATCTCATGGGCATTGTTTTCTTCTCTGCTT | |
| | TGTCTGTGTTTTGAGTCTGCTTTCTTTTGTCTTTAAAACCTGATTTTTAAGTTCTTCTGAACTGTAGAAA | |
| | TAGCTATCTGATCACTTCAGCGTAAAGCAGTGTGTTTATTAACCATCCACTAAGCTAAAACTAGAGCAGT | |
| | TTGATTTAAAAGTGTCACTCTTCCTCCTTTTCTACTTTCAGTAGATATGAGATAGAGCATAATTATCTGT | |
| | TTTATCTTAGTTTTATACATAATTTACCATCAGATAGAACTTTATGGTTCTAGTACAGATACTCTACTAC | |
| | ACTCAGCCTCTTATGTGCCAAGTTTTTCTTTAAGCAATGAGAAATTGCTCATGTTCTTCATCTTCTCAAA | |
| | TCATCAGAGGCCGAAGAAAAACACTTTGGCTGTGTCTATAACTTGACACAGTCAATAGAATGAAGAAAAT | |
| | TAGAGTAGTTATGTGATTATTTCAGCTCTTGACCTGTCCCCTCTGGCTGCCTCTGAGTCTGAATCTCCCA | |
| | AAGAGAGAAACCAATTTCTAAGAGGACTGGATTGCAGAAGACTCGGGGACAACATTTGATCCAAGATCTT | |
| | AAATGTTATATTGATAACCATGCTCAGCAATGAGCTATTAGATTCATTTTGGGAAATCTCCATAATTTCA | |
| | ATTTGTAAACTTTGTTAAGACCTGTCTACATTGTTATATGTGTGTGACTTGAGTAATGTTATCAACGTTT | |
| | TTGTAAATATTTACTATGTTTTTCTATTAGCTAAATTCCAACAATTTTGTACTTTAATAAAATGTTCTAA | |
| | ACATTGCAACCCA | |
| TYMS | CGGGACGGCCGCGGGAAAAGGCGCGCGGAAGGGGTCCTGCCACCGCGCCACTTGGCCTGCCTCCGTCCCG | 196 |
| NM_001071.2 | CCGCGCCACTTGGCCTGCCTCCGTCCCGCCGCGCCACTTCGCCTGCCTCCGTCCCCCGCCCGCCGCGCCA | |
| | TGCCTGTGGCCGGCTCGGAGCTGCCGCGCCGGCCCTTGCCCCCCGCCGCACAGGAGCGGGACGCCGAGCC | |
| | GCGTCCGCCGCACGGGGAGCTGCAGTACCTGGGGCAGATCCAACACATCCTCCGCTGCGGCGTCAGGAAG | |
| | GACGACCGCACGGGCACCGGCACCCTGTCGGTATTCGGCATGCAGGCGCGCTACAGCCTGAGAGATGAAT | |
| | TCCCTCTGCTGACAACCAAACGTGTGTTCTGGAAGGGTGTTTTGGAGGAGTTGCTGTGGTTTATCAAGGG | |
| | ATCCACAAATGCTAAAGAGCTGTCTTCCAAGGGAGTGAAAATCTGGGATGCCAATGGATCCCGAGACTTT | |
| | TTGGACAGCCTGGGATTCTCCACCAGAGAAGAAGGGGACTTGGGCCCAGTTTATGGCTTCCAGTGGAGGC | |
| | ATTTTGGGGCAGAATACAGAGATATGGAATCAGATTATTCAGGACAGGGAGTTGACCAACTGCAAAGAGT | |
| | GATTGACACCATCAAAACCAACCCTGACGACAGAAGAATCATCATGTGCGCTTGGAATCCAAGAGATCTT | |
| | CCTCTGATGGCGCTGCCTCCATGCCATGCCCTCTGCCAGTTCTATGTGGTGAACAGTGAGCTGTCCTGCC | |
| | AGCTGTACCAGAGATCGGGAGACATGGGCCTCGGTGTGCCTTTCAACATCGCCAGCTACGCCCTGCTCAC | |
| | GTACATGATTGCGCACATCACGGGCCTGAAGCCAGGTGACTTTATACACACTTTGGGAGATGCACATATT | |
| | TACCTGAATCACATCGAGCCACTGAAAATTCAGCTTCAGCGAGAACCCAGACCTTTCCCAAAGCTCAGGA | |
| | TTCTTCGAAAAGTTGAGAAAATTGATGACTTCAAAGCTGAAGACTTTCAGATTGAAGGGTACAATCCGCA | |
| | TCCAACTATTAAAATGGAAATGGCTGTTTAGGGTGCTTTCAAAGGAGCTCGAAGGATATTGTCAGTCTTT | |
| | AGGGGTTGGGCTGGATGCCGAGGTAAAAGTTCTTTTTGCTCTAAAAGAAAAAGGAACTAGGTCAAAAATC | |
| | TGTCCGTGACCTATCAGTTATTAATTTTTAAGGATGTTGCCACTGGCAAATGTAACTGTGCCAGTTCTTT | |
| | CCATAATAAAAGGCTTTGAGTTAACTCACTGAGGGTATCTGACAATGCTGAGGTTATGAACAAAGTGAGG | |
| | AGAATGAAATGTATGTGCTCTTAGCAAAAACATGTATGTGCATTTCAATCCCACGTACTTATAAAGAAGG | |
| | TTGGTGAATTTCACAAGCTATTTTTGGAATATTTTTAGAATATTTTAAGAATTTCACAAGCTATTCCCTC | |
| | AAATCTGAGGGAGCTGAGTAACACCATCGATCATGATGTAGAGTGTGGTTATGAACTTTAAAGTTATAGT | |
| | TGTTTTATATGTTGCTATAATAAAGAAGTGTTCTGCATTCGTCAAAAAAAAAAAAAAAAAAAA | |
| CCNB1 | CGAACGCCTTCGCGCGATCGCCCTGGAAACGCATTCTCTGCGACCGGCAGCCGCCAATGGGAAGGGAGTG | 197 |
| NM_031966.3 | AGTGCCACGAACAGGCCAATAAGGAGGGAGCAGTGCGGGGTTTAAATCTGAGGCTAGGCTGGCTCTTCTC | |
| | GGCGTGCTGCGGCGGAACGGCTGTTGGTTTCTGCTGGGTGTAGGTCCTTGGCTGGTCGGGCCTCCGGTGT | |
| | TCTGCTTCTCCCCGCTGAGCTGCTGCCTGGTGAAGAGGAAGCCATGGCGCTCCGAGTCACCAGGAACTCG | |
| | AAAATTAATGCTGAAAATAAGGCGAAGATCAACATGGCAGGCGCAAAGCGCGTTCCTACGGCCCCTGCTG | |
| | CAACCTCCAAGCCCGGACTGAGGCCAAGAACAGCTCTTGGGGACATTGGTAACAAAGTCAGTGAACAACT | |
| | GCAGGCCAAAATGCCTATGAAGAAGGAAGCAAAACCTTCAGCTACTGGAAAAGTCATTGATAAAAAACTA | |
| | CCAAAACCTCTTGAAAAGGTACCTATGCTGGTGCCAGTGCCAGTGTCTGAGCCAGTGCCAGAGCCAGAAC | |
| | CTGAGCCAGAACCTGAGCCTGTTAAAGAAGAAAAACTTTCGCCTGAGCCTATTTTGGTTGATACTGCCTC | |
| | TCCAAGCCCAATGGAAACATCTGGATGTGCCCCTGCAGAAGAAGACCTGTGTCAGGCTTTCTCTGATGTA | |
| | ATTCTTGCAGTAAATGATGTGGATGCAGAAGATGGAGCTGATCCAAACCTTTGTAGTGAATATGTGAAAG | |
| | ATATTTATGCTTATCTGAGACAACTTGAGGAAGAGCAAGCAGTCAGACCAAAATACCTACTGGGTCGGGA | |
| | AGTCACTGGAAACATGAGAGCCATCCTAATTGACTGGCTAGTACAGGTTCAAATGAAATTCAGGTTGTTG | |
| | CAGGAGACCATGTACATGACTGTCTCCATTATTGATCGGTTCATGCAGAATAATTGTGTGCCCAAGAAGA | |
| | TGCTGCAGCTGGTTGGTGTCACTGCCATGTTTATTGCAAGCAAATATGAAGAAATGTACCCTCCAGAAAT | |
| | TGGTGACTTTGCTTTTGTGACTGACAACACTTATACTAAGCACCAAATCAGACAGATGGAAATGAAGATT | |
| | CTAAGAGCTTTAAACTTTGGTCTGGGTCGGCCTCTACCTTTGCACTTCCTTCGGAGAGCATCTAAGATTG | |
| | GAGAGGTTGATGTCGAGCAACATACTTTGGCCAAATACCTGATGGAACTAACTATGTTGGACTATGACAT | |
| | GGTGCACTTTCCTCCTTCTCAAATTGCAGCAGGAGCTTTTTGCTTAGCACTGAAAATTCTGGATAATGGT | |
| | GAATGGACACCAACTCTACAACATTACCTGTCATATACTGAAGAATCTCTTCTTCCAGTTATGCAGCACC | |
| | TGGCTAAGAATGTAGTCATGGTAAATCAAGGACTTACAAAGCACATGACTGTCAAGAACAAGTATGCCAC | |
| | ATCGAAGCATGCTAAGATCAGCACTCTACCACAGCTGAATTCTGCACTAGTTCAAGATTTAGCCAAGGCT | |
| | GTGGCAAAGGTGTAACTTGTAAACTTGAGTTGGAGTACTATATTTACAAATAAAATTGGCACCATGTGCC | |
| | ATCTGTACATATTACTGTTGCATTTACTTTTAATAAAGCTTGTGGCCCCTTTTACTTTTTTATAGCTTAA | |
| | CTAATTTGAATGTGGTTACTTCCTACTGTAGGGTAGCGGAAAAGTTGTCTTAAAAGGTATGGTGGGGATA | |
| | TTTTTAAAAACTCCTTTTGGTTTACCTGGGGATCCAATTGATGTATATGTTTATATACTGGGTTCTTGTT | |
| | TTATATACCTGGCTTTTACTTTATTAATATGAGTTACTGAAGGTGATGGAGGTATTTGAAAATTTTACTT | |
| | CCATAGGACATACTGCATGTAAGCCAAGTCATGGAGAATCTGCTGCATAGCTCTATTTTAAAGTAAAAGT | |
| | CTACCACCGAATCCCTAGTCCCCCTGTTTTCTGTTTCTTCTTGTGATTGCTGCCATAATTCTAAGTTATT | |
| | TACTTTTACCACTATTTAAGTTATCAACTTTAGCTAGTATCTTCAAACTTTCACTTTGAAAAATGAGAAT | |
| | TTTATATTCTAAGCCAGTTTTCATTTTGGTTTTGTGTTTTGGTTAATAAAACAATACTCAAATACAAAAA | |
| | AAAAAAA | |
| MKI67 | TACCGGGCGGAGGTGAGCGCGGCGCCGGCTCCTCCTGCGGCGGACTTTGGGTGCGACTTGACGAGCGGTG | 198 |
| NM_002417.4 | GTTCGACAAGTGGCCTTGCGGGCCGGATCGTCCCAGTGGAAGAGTTGTAAATTTGCTTCTGGCCTTCCCC | |
| | TACGGATTATACCTGGCCTTCCCCTACGGATTATACTCAACTTACTGTTTAGAAAATGTGGCCCACGAGA | |
| | CGCCTGGTTACTATCAAAAGGAGCGGGGTCGACGGTCCCCACTTTCCCCTGAGCCTCAGCACCTGCTTGT | |
| | TTGGAAGGGGTATTGAATGTGACATCCGTATCCAGCTTCCTGTTGTGTCAAAACAACATTGCAAAATTGA | |
| | AATCCATGAGCAGGAGGCAATATTACATAATTTCAGTTCCACAAATCCAACACAAGTAAATGGGTCTGTT | |
| | ATTGATGAGCCTGTACGGCTAAAACATGGAGATGTAATAACTATTATTGATCGTTCCTTCAGGTATGAAA | |
| | ATGAAAGTCTTCAGAATGGAAGGAAGTCAACTGAATTTCCAAGAAAAATACGTGAACAGGAGCCAGCACG | |
| | TCGTGTCTCAAGATCTAGCTTCTCTTCTGACCCTGATGAGAAAGCTCAAGATTCCAAGGCCTATTCAAAA | |
| | ATCACTGAAGGAAAAGTTTCAGGAAATCCTCAGGTACATATCAAGAATGTCAAAGAAGACAGTACCGCAG | |
| | ATGACTCAAAAGACAGTGTTGCTCAGGGAACAACTAATGTTCATTCCTCAGAACATGCTGGACGTAATGG | |
| | CAGAAATGCAGCTGATCCCATTTCTGGGGATTTTAAAGAAATTTCCAGCGTTAAATTAGTGAGCCGTTAT | |
| | GGAGAATTGAAGTCTGTTCCCACTACACAATGTCTTGACAATAGCAAAAAAAATGAATCTCCCTTTTGGA | |
| | AGCTTTATGAGTCAGTGAAGAAAGAGTTGGATGTAAAATCACAAAAAGAAAATGTCCTACAGTATTGTAG | |
| | AAAATCTGGATTACAAACTGATTACGCAACAGAGAAAGAAAGTGCTGATGGTTTACAGGGGGAGACCCAA | |
| | CTGTTGGTCTCGCGTAAGTCAAGACCAAAATCTGGTGGGAGCGGCCACGCTGTGGCAGAGCCTGCTTCAC | |
| | CTGAACAAGAGCTTGACCAGAACAAGGGGAAGGGAAGAGACGTGGAGTCTGTTCAGACTCCCAGCAAGGC | |
| | TGTGGGCGCCAGCTTTCCTCTCTATGAGCCGGCTAAAATGAAGACCCCTGTACAATATTCACAGCAACAA | |
| | AATTCTCCACAAAAACATAAGAACAAAGACCTGTATACTACTGGTAGAAGAGAATCTGTGAATCTGGGTA | |
| | AAAGTGAAGGCTTCAAGGCTGGTGATAAAACTCTTACTCCCAGGAAGCTTTCAACTAGAAATCGAACACC | |
| | AGCTAAAGTTGAAGATGCAGCTGACTCTGCCACTAAGCCAGAAAATCTCTCTTCCAAAACCAGAGGAAGT | |
| | ATTCCTACAGATGTGGAAGTTCTGCCTACGGAAACTGAAATTCACAATGAGCCATTTTTAACTCTGTGGC | |
| | TCACTCAAGTTGAGAGGAAGATCCAAAAGGATTCCCTCAGCAAGCCTGAGAAATTGGGCACTACAGCTGG | |
| | ACAGATGTGCTCTGGGTTACCTGGTCTTAGTTCAGTTGATATCAACAACTTTGGTGATTCCATTAATGAG | |
| | AGTGAGGGAATACCTTTGAAAAGAAGGCGTGTGTCCTTTGGTGGGCACCTAAGACCTGAACTATTTGATG | |
| | AAAACTTGCCTCCTAATACGCCTCTCAAAAGGGGAGAAGCCCCAACCAAAAGAAAGTCTCTGGTAATGCA | |
| | CACTCCACCTGTCCTGAAGAAAATCATCAAGGAACAGCCTCAACCATCAGGAAAACAAGAGTCAGGTTCA | |
| | GAAATCCATGTGGAAGTGAAGGCACAAAGCTTGGTTATAAGCCCTCCAGCTCCTAGTCCTAGGAAAACTC | |
| | CAGTTGCCAGTGATCAACGCCGTAGGTCCTGCAAAACAGCCCCTGCTTCCAGCAGCAAATCTCAGACAGA | |
| | GGTTCCTAAGAGAGGAGGGAGAAAGAGTGGCAACCTGCCTTCAAAGAGAGTGTCTATCAGCCGAAGTCAA | |
| | CATGATATTTTACAGATGATATGTTCCAAAAGAAGAAGTGGTGCTTCGGAAGCAAATCTGATTGTTGCAA | |
| | AATCATGGGCAGATGTAGTAAAACTTGGTGCAAAACAAACACAAACTAAAGTCATAAAACATGGTCCTCA | |
| | AAGGTCAATGAACAAAAGGCAAAGAAGACCTGCTACTCCAAAGAAGCCTGTGGGCGAAGTTCACAGTCAA | |
| | TTTAGTACAGGCCACGCAAACTCTCCTTGTACCATAATAATAGGGAAAGCTCATACTGAAAAAGTACATG | |
| | TGCCTGCTCGACCCTACAGAGTGCTCAACAACTTCATTTCCAACCAAAAAATGGACTTTAAGGAAGATCT | |
| | TTCAGGAATAGCTGAAATGTTCAAGACCCCAGTGAAGGAGCAACCGCAGTTGACAAGCACATGTCACATC | |
| | GCTATTTCAAATTCAGAGAATTTGCTTGGAAAACAGTTTCAAGGAACTGATTCAGGAGAAGAACCTCTGC | |
| | TCCCCACCTCAGAGAGTTTTGGAGGAAATGTGTTCTTCAGTGCACAGAATGCAGCAAAACAGCCATCTGA | |
| | TAAATGCTCTGCAAGCCCTCCCTTAAGACGGCAGTGTATTAGAGAAAATGGAAACGTAGCAAAAACGCCC | |
| | AGGAACACCTACAAAATGACTTCTCTGGAGACAAAAACTTCAGATACTGAGACAGAGCCTTCAAAAACAG | |
| | TATCCACTGCAAACAGGTCAGGAAGGTCTACAGAGTTCAGGAATATACAGAAGCTACCTGTGGAAAGTAA | |
| | GAGTGAAGAAACAAATACAGAAATTGTTGAGTGCATCCTAAAAAGAGGTCAGAAGGCAACACTACTACAA | |
| | CAAAGGAGAGAAGGAGAGATGAAGGAAATAGAAAGACCTTTTGAGACATATAAGGAAAATATTGAATTAA | |
| | AAGAAAACGATGAAAAGATGAAAGCAATGAAGAGATCAAGAACTTGGGGGCAGAAATGTGCACCAATGTC | |
| | TGACCTGACAGACCTCAAGAGCTTGCCTGATACAGAACTCATGAAAGACACGGCACGTGGCCAGAATCTC | |
| | CTCCAAACCCAAGATCATGCCAAGGCACCAAAGAGTGAGAAAGGCAAAATCACTAAAATGCCCTGCCAGT | |
| | CATTACAACCAGAACCAATAAACACCCCAACACACACAAAACAACAGTTGAAGGCATCCCTGGGGAAAGT | |
| | AGGTGTGAAAGAAGAGCTCCTAGCAGTCGGCAAGTTCACACGGACGTCAGGGGAGACCACGCACACGCAC | |
| | AGAGAGCCAGCAGGAGATGGCAAGAGCATCAGAACGTTTAAGGAGTCTCCAAAGCAGATCCTGGACCCAG | |
| | CAGCCCGTGTAACTGGAATGAAGAAGTGGCCAAGAACGCCTAAGGAAGAGGCCCAGTCACTAGAAGACCT | |
| | GGCTGGCTTCAAAGAGCTCTTCCAGACACCAGGTCCCTCTGAGGAATCAATGACTGATGAGAAAACTACC | |
| | AAAATAGCCTGCAAATCTCCACCACCAGAATCAGTGGACACTCCAACAAGCACAAAGCAATGGCCTAAGA | |
| | GAAGTCTCAGGAAAGCAGATGTAGAGGAAGAATTCTTAGCACTCAGGAAACTAACACCATCAGCAGGGAA | |
| | AGCCATGCTTACGCCCAAACCAGCAGGAGGTGATGAGAAAGACATTAAAGCATTTATGGGAACTCCAGTG | |
| | CAGAAACTGGACCTGGCAGGAACTTTACCTGGCAGCAAAAGACAGCTACAGACTCCTAAGGAAAAGGCCC | |
| | AGGCTCTAGAAGACCTGGCTGGCTTTAAAGAGCTCTTCCAGACTCCTGGTCACACCGAGGAATTAGTGGC | |
| | TGCTGGTAAAACCACTAAAATACCCTGCGACTCTCCACAGTCAGACCCAGTGGACACCCCAACAAGCACA | |
| | AAGCAACGACCCAAGAGAAGTATCAGGAAAGCAGATGTAGAGGGAGAACTCTTAGCGTGCAGGAATCTAA | |
| | TGCCATCAGCAGGCAAAGCCATGCACACGCCTAAACCATCAGTAGGTGAAGAGAAAGACATCATCATATT | |
| | TGTGGGAACTCCAGTGCAGAAACTGGACCTGACAGAGAACTTAACCGGCAGCAAGAGACGGCCACAAACT | |
| | CCTAAGGAAGAGGCCCAGGCTCTGGAAGACCTGACTGGCTTTAAAGAGCTCTTCCAGACCCCTGGTCATA | |
| | CTGAAGAAGCAGTGGCTGCTGGCAAAACTACTAAAATGCCCTGCGAATCTTCTCCACCAGAATCAGCAGA | |
| | CACCCCAACAAGCACAAGAAGGCAGCCCAAGACACCTTTGGAGAAAAGGGACGTACAGAAGGAGCTCTCA | |
| | GCCCTGAAGAAGCTCACACAGACATCAGGGGAAACCACACACACAGATAAAGTACCAGGAGGTGAGGATA | |
| | AAAGCATCAACGCGTTTAGGGAAACTGCAAAACAGAAACTGGACCCAGCAGCAAGTGTAACTGGTAGCAA | |
| | GAGGCACCCAAAAACTAAGGAAAAGGCCCAACCCCTAGAAGACCTGGCTGGCTTGAAAGAGCTCTTCCAG | |
| | ACACCAGTATGCACTGACAAGCCCACGACTCACGAGAAAACTACCAAAATAGCCTGCAGATCACAACCAG | |
| | ACCCAGTGGACACACCAACAAGCTCCAAGCCACAGTCCAAGAGAAGTCTCAGGAAAGTGGACGTAGAAGA | |
| | AGAATTCTTCGCACTCAGGAAACGAACACCATCAGCAGGCAAAGCCATGCACACACCCAAACCAGCAGTA | |
| | AGTGGTGAGAAAAACATCTACGCATTTATGGGAACTCCAGTGCAGAAACTGGACCTGACAGAGAACTTAA | |
| | CTGGCAGCAAGAGACGGCTACAAACTCCTAAGGAAAAGGCCCAGGCTCTAGAAGACCTGGCTGGCTTTAA | |
| | AGAGCTCTTCCAGACACGAGGTCACACTGAGGAATCAATGACTAACGATAAAACTGCCAAAGTAGCCTGC | |
| | AAATCTTCACAACCAGACCCAGACAAAAACCCAGCAAGCTCCAAGCGACGGCTCAAGACATCCCTGGGGA | |
| | AAGTGGGCGTGAAAGAAGAGCTCCTAGCAGTTGGCAAGCTCACACAGACATCAGGAGAGACTACACACAC | |
| | ACACACAGAGCCAACAGGAGATGGTAAGAGCATGAAAGCATTTATGGAGTCTCCAAAGCAGATCTTAGAC | |
| | TCAGCAGCAAGTCTAACTGGCAGCAAGAGGCAGCTGAGAACTCCTAAGGGAAAGTCTGAAGTCCCTGAAG | |
| | ACCTGGCCGGCTTCATCGAGCTCTTCCAGACACCAAGTCACACTAAGGAATCAATGACTAACGAAAAAAC | |
| | TACCAAAGTATCCTACAGAGCTTCACAGCCAGACCTAGTGGACACCCCAACAAGCTCCAAGCCACAGCCC | |
| | AAGAGAAGTCTCAGGAAAGCAGACACTGAAGAAGAATTTTTAGCATTTAGGAAACAAACGCCATCAGCAG | |
| | GCAAAGCCATGCACACACCCAAACCAGCAGTAGGTGAAGAGAAAGACATCAACACGTTTTTGGGAACTCC | |
| | AGTGCAGAAACTGGACCAGCCAGGAAATTTACCTGGCAGCAATAGACGGCTACAAACTCGTAAGGAAAAG | |
| | GCCCAGGCTCTAGAAGAACTGACTGGCTTCAGAGAGCTTTTCCAGACACCATGCACTGATAACCCCACGA | |
| | CTGATGAGAAAACTACCAAAAAAATACTCTGCAAATCTCCGCAATCAGACCCAGCGGACACCCCAACAAA | |
| | CACAAAGCAACGGCCCAAGAGAAGCCTCAAGAAAGCAGACGTAGAGGAAGAATTTTTAGCATTCAGGAAA | |
| | CTAACACCATCAGCAGGCAAAGCCATGCACACGCCTAAAGCAGCAGTAGGTGAAGAGAAAGACATCAACA | |
| | CATTTGTGGGGACTCCAGTGGAGAAACTGGACCTGCTAGGAAATTTACCTGGCAGCAAGAGACGGCCACA | |
| | AACTCCTAAAGAAAAGGCCAAGGCTCTAGAAGATCTGGCTGGCTTCAAAGAGCTCTTCCAGACACCAGGT | |
| | CACACTGAGGAATCAATGACCGATGACAAAATCACAGAAGTATCCTGCAAATCTCCACAACCAGACCCAG | |
| | TCAAAACCCCAACAAGCTCCAAGCAACGACTCAAGATATCCTTGGGGAAAGTAGGTGTGAAAGAAGAGGT | |
| | CCTACCAGTCGGCAAGCTCACACAGACGTCAGGGAAGACCACACAGACACACAGAGAGACAGCAGGAGAT | |
| | GGAAAGAGCATCAAAGCGTTTAAGGAATCTGCAAAGCAGATGCTGGACCCAGCAAACTATGGAACTGGGA | |
| | TGGAGAGGTGGCCAAGAACACCTAAGGAAGAGGCCCAATCACTAGAAGACCTGGCCGGCTTCAAAGAGCT | |
| | CTTCCAGACACCAGACCACACTGAGGAATCAACAACTGATGACAAAACTACCAAAATAGCCTGCAAATCT | |
| | CCACCACCAGAATCAATGGACACTCCAACAAGCACAAGGAGGCGGCCCAAAACACCTTTGGGGAAAAGGG | |
| | ATATAGTGGAAGAGCTCTCAGCCCTGAAGCAGCTCACACAGACCACACACACAGACAAAGTACCAGGAGA | |
| | TGAGGATAAAGGCATCAACGTGTTCAGGGAAACTGCAAAACAGAAACTGGACCCAGCAGCAAGTGTAACT | |
| | GGTAGCAAGAGGCAGCCAAGAACTCCTAAGGGAAAAGCCCAACCCCTAGAAGACTTGGCTGGCTTGAAAG | |
| | AGCTCTTCCAGACACCAATATGCACTGACAAGCCCACGACTCATGAGAAAACTACCAAAATAGCCTGCAG | |
| | ATCTCCACAACCAGACCCAGTGGGTACCCCAACAATCTTCAAGCCACAGTCCAAGAGAAGTCTCAGGAAA | |
| | GCAGACGTAGAGGAAGAATCCTTAGCACTCAGGAAACGAACACCATCAGTAGGGAAAGCTATGGACACAC | |
| | CCAAACCAGCAGGAGGTGATGAGAAAGACATGAAAGCATTTATGGGAACTCCAGTGCAGAAATTGGACCT | |
| | GCCAGGAAATTTACCTGGCAGCAAAAGATGGCCACAAACTCCTAAGGAAAAGGCCCAGGCTCTAGAAGAC | |
| | CTGGCTGGCTTCAAAGAGCTCTTCCAGACACCAGGCACTGACAAGCCCACGACTGATGAGAAAACTACCA | |
| | AAATAGCCTGCAAATCTCCACAACCAGACCCAGTGGACACCCCAGCAAGCACAAAGCAACGGCCCAAGAG | |
| | AAACCTCAGGAAAGCAGACGTAGAGGAAGAATTTTTAGCACTCAGGAAACGAACACCATCAGCAGGCAAA | |
| | GCCATGGACACACCAAAACCAGCAGTAAGTGATGAGAAAAATATCAACACATTTGTGGAAACTCCAGTGC | |
| | AGAAACTGGACCTGCTAGGAAATTTACCTGGCAGCAAGAGACAGCCACAGACTCCTAAGGAAAAGGCTGA | |
| | GGCTCTAGAGGACCTGGTTGGCTTCAAAGAACTCTTCCAGACACCAGGTCACACTGAGGAATCAATGACT | |
| | GATGACAAAATCACAGAAGTATCCTGTAAATCTCCACAGCCAGAGTCATTCAAAACCTCAAGAAGCTCCA | |
| | AGCAAAGGCTCAAGATACCCCTGGTGAAAGTGGACATGAAAGAAGAGCCCCTAGCAGTCAGCAAGCTCAC | |
| | ACGGACATCAGGGGAGACTACGCAAACACACACAGAGCCAACAGGAGATAGTAAGAGCATCAAAGCGTTT | |
| | AAGGAGTCTCCAAAGCAGATCCTGGACCCAGCAGCAAGTGTAACTGGTAGCAGGAGGCAGCTGAGAACTC | |
| | GTAAGGAAAAGGCCCGTGCTCTAGAAGACCTGGTTGACTTCAAAGAGCTCTTCTCAGCACCAGGTCACAC | |
| | TGAAGAGTCAATGACTATTGACAAAAACACAAAAATTCCCTGCAAATCTCCCCCACCAGAACTAACAGAC | |
| | ACTGCCACGAGCACAAAGAGATGCCCCAAGACACGTCCCAGGAAAGAAGTAAAAGAGGAGCTCTCAGCAG | |
| | TTGAGAGGCTCACGCAAACATCAGGGCAAAGCACACACACACACAAAGAACCAGCAAGCGGTGATGAGGG | |
| | CATCAAAGTATTGAAGCAACGTGCAAAGAAGAAACCAAACCCAGTAGAAGAGGAACCCAGCAGGAGAAGG | |
| | CCAAGAGCACCTAAGGAAAAGGCCCAACCCCTGGAAGACCTGGCCGGCTTCACAGAGCTCTCTGAAACAT | |
| | CAGGTCACACTCAGGAATCACTGACTGCTGGCAAAGCCACTAAAATACCCTGCGAATCTCCCCCACTAGA | |
| | AGTGGTAGACACCACAGCAAGCACAAAGAGGCATCTCAGGACACGTGTGCAGAAGGTACAAGTAAAAGAA | |
| | GAGCCTTCAGCAGTCAAGTTCACACAAACATCAGGGGAAACCACGGATGCAGACAAAGAACCAGCAGGTG | |
| | AAGATAAAGGCATCAAAGCATTGAAGGAATCTGCAAAACAGACACCGGCTCCAGCAGCAAGTGTAACTGG | |
| | CAGCAGGAGACGGCCAAGAGCACCCAGGGAAAGTGCCCAAGCCATAGAAGACCTAGCTGGCTTCAAAGAC | |
| | CCAGCAGCAGGTCACACTGAAGAATCAATGACTGATGACAAAACCACTAAAATACCCTGCAAATCATCAC | |
| | CAGAACTAGAAGACACCGCAACAAGCTCAAAGAGACGGCCCAGGACACGTGCCCAGAAAGTAGAAGTGAA | |
| | GGAGGAGCTGTTAGCAGTTGGCAAGCTCACACAAACCTCAGGGGAGACCACGCACACCGACAAAGAGCCG | |
| | GTAGGTGAGGGCAAAGGCACGAAAGCATTTAAGCAACCTGCAAAGCGGAAGCTGGACGCAGAAGATGTAA | |
| | TTGGCAGCAGGAGACAGCCAAGAGCACCTAAGGAAAAGGCCCAACCCCTGGAAGATCTGGCCAGCTTCCA | |
| | AGAGCTCTCTCAAACACCAGGCCACACTGAGGAACTGGCAAATGGTGCTGCTGATAGCTTTACAAGCGCT | |
| | CCAAAGCAAACACCTGACAGTGGAAAACCTCTAAAAATATCCAGAAGAGTTCTTCGGGCCCCTAAAGTAG | |
| | AACCCGTGGGAGACGTGGTAAGCACCAGAGACCCTGTAAAATCACAAAGCAAAAGCAACACTTCCCTGCC | |
| | CCCACTGCCCTTCAAGAGGGGAGGTGGCAAAGATGGAAGCGTCACGGGAACCAAGAGGCTGCGCTGCATG | |
| | CCAGCACCAGAGGAAATTGTGGAGGAGCTGCCAGCCAGCAAGAAGCAGAGGGTTGCTCCCAGGGCAAGAG | |
| | GCAAATCATCCGAACCCGTGGTCATCATGAAGAGAAGTTTGAGGACTTCTGCAAAAAGAATTGAACCTGC | |
| | GGAAGAGCTGAACAGCAACGACATGAAAACCAACAAAGAGGAACACAAATTACAAGACTCGGTCCCTGAA | |
| | AATAAGGGAATATCCCTGCGCTCCAGACGCCAAAATAAGACTGAGGCAGAACAGCAAATAACTGAGGTCT | |
| | TTGTATTAGCAGAAAGAATAGAAATAAACAGAAATGAAAAGAAGCCCATGAAGACCTCCCCAGAGATGGA | |
| | CATTCAGAATCCAGATGATGGAGCCCGGAAACCCATACCTAGAGACAAAGTCACTGAGAACAAAAGGTGC | |
| | TTGAGGTCTGCTAGACAGAATGAGAGCTCCCAGCCTAAGGTGGCAGAGGAGAGCGGAGGGCAGAAGAGTG | |
| | CGAAGGTTCTCATGCAGAATCAGAAAGGGAAAGGAGAAGCAGGAAATTCAGACTCCATGTGCCTGAGATC | |
| | AAGAAAGACAAAAAGCCAGCCTGCAGCAAGCACTTTGGAGAGCAAATCTGTGCAGAGAGTAACGCGGAGT | |
| | GTCAAGAGGTGTGCAGAAAATCCAAAGAAGGCTGAGGACAATGTGTGTGTCAAGAAAATAAGAACCAGAA | |
| | GTCATAGGGACAGTGAAGATATTTGACAGAAAAATCGAACTGGGAAAAATATAATAAAGTTAGTTTTGTG | |
| | ATAAGTTCTAGTGCAGTTTTTGTCATAAATTACAAGTGAATTCTGTAAGTAAGGCTGTCAGTCTGCTTAA | |
| | GGGAAGAAAACTTTGGATTTGCTGGGTCTGAATCGGCTTCATAAACTCCACTGGGAGCACTGCTGGGCTC | |
| | CTGGACTGAGAATAGTTGAACACCGGGGGCTTTGTGAAGGAGTCTGGGCCAAGGTTTGCCCTCAGCTTTG | |
| | CAGAATGAAGCCTTGAGGTCTGTCACCACCCACAGCCACCCTACAGCAGCCTTAACTGTGACACTTGCCA | |
| | CACTGTGTCGTCGTTTGTTTGCCTATGTCCTCCAGGGCACGGTGGCAGGAACAACTATCCTCGTCTGTCC | |
| | CAACACTGAGCAGGCACTCGGTAAACACGAATGAATGGATGAGCGCACGGATGAATGGAGCTTACAAGAT | |
| | CTGTCTTTCCAATGGCCGGGGGCATTTGGTCCCCAAATTAAGGCTATTGGACATCTGCACAGGACAGTCC | |
| | TATTTTTGATGTCCTTTCCTTTCTGAAAATAAAGTTTTGTGCTTTGGAGAATGACTCGTGAGCACATCTT | |
| | TAGGGACCAAGAGTGACTTTCTGTAAGGAGTGACTCGTGGCTTGCCTTGGTCTCTTGGGAATACTTTTCT | |
| | AACTAGGGTTGCTCTCACCTGAGACATTCTCCACCCGCGGAATCTCAGGGTCCCAGGCTGTGGGCCATCA | |
| | CGACCTCAAACTGGCTCCTAATCTCCAGCTTTCCTGTCATTGAAAGCTTCGGAAGTTTACTGGCTCTGCT | |
| | CCCGCCTGTTTTCTTTCTGACTCTATCTGGCAGCCCGATGCCACCCAGTACAGGAAGTGACACCAGTACT | |
| | CTGTAAAGCATCATCATCCTTGGAGAGACTGAGCACTCAGCACCTTCAGCCACGATTTCAGGATCGCTTC | |
| | CTTGTGAGCCGCTGCCTCCGAAATCTCCTTTGAAGCCCAGACATCTTTCTCCAGCTTCAGACTTGTAGAT | |
| | ATAACTCGTTCATCTTCATTTACTTTCCACTTTGCCCCCTGTCCTCTCTGTGTTCCCCAAATCAGAGAAT | |
| | AGCCCGCCATCCCCCAGGTCACCTGTCTGGATTCCTCCCCATTCACCCACCTTGCCAGGTGCAGGTGAGG | |
| | ATGGTGCACCAGACAGGGTAGCTGTCCCCCAAAATGTGCCCTGTGCGGGCAGTGCCCTGTCTCCACGTTT | |
| | GTTTCCCCAGTGTCTGGCGGGGAGCCAGGTGACATCATAAATACTTGCTGAATGAATGCAGAAATCAGCG | |
| | GTACTGACTTGTACTATATTGGCTGCCATGATAGGGTTCTCACAGCGTCATCCATGATCGTAAGGGAGAA | |
| | TGACATTCTGCTTGAGGGAGGGAATAGAAAGGGGCAGGGAGGGGACATCTGAGGGCTTCACAGGGCTGCA | |
| | AAGGGTACAGGGATTGCACCAGGGCAGAACAGGGGAGGGTGTTCAAGGAAGAGTGGCTCTTAGCAGAGGC | |
| | ACTTTGGAAGGTGTGAGGCATAAATGCTTCCTTCTACGTAGGCCAACCTCAAAACTTTCAGTAGGAATGT | |
| | TGCTATGATCAAGTTGTTCTAACACTTTAGACTTAGTAGTAATTATGAACCTCACATAGAAAAATTTCAT | |
| | CCAGCCATATGCCTGTGGAGTGGAATATTCTGTTTAGTAGAAAAATCCTTTAGAGTTCAGCTCTAACCAG | |
| | AAATCTTGCTGAAGTATGTCAGCACCTTTTCTCACCCTGGTAAGTACAGTATTTCAAGAGCACGCTAAGG | |
| | GTGGTTTTCATTTTACAGGGCTGTTGATGATGGGTTAAAAATGTTCATTTAAGGGCTACCCCCGTGTTTA | |
| | ATAGATGAACACCACTTCTACACAACCCTCCTTGGTACTGGGGGAGGGAGAGATCTGACAAATACTGCCC | |
| | ATTCCCCTAGGCTGACTGGATTTGAGAACAAATACCCACCCATTTCCACCATGGTATGGTAACTTCTCTG | |
| | AGCTTCAGTTTCCAAGTGAATTTCCATGTAATAGGACATTCCCATTAAATACAAGCTGTTTTTACTTTTT | |
| | CGCCTCCCAGGGCCTGTGGGATCTGGTCCCCCAGCCTCTCTTGGGCTTTCTTACACTAACTCTGTACCTA | |
| | CCATCTCCTGCCTCCCTTAGGCAGGCACCTCCAACCACCACACACTCCCTGCTGTTTTCCCTGCCTGGAA | |
| | CTTTCCCTCCTGCCCCACCAAGATCATTTCATCCAGTCCTGAGCTCAGCTTAAGGGAGGCTTCTTGCCTG | |
| | TGGGTTCCCTCACCCCCATGCCTGTCCTCCAGGCTGGGGCAGGTTCTTAGTTTGCCTGGAATTGTTCTGT | |
| | ACCTCTTTGTAGCACGTAGTGTTGTGGAAACTAAGCCACTAATTGAGTTTCTGGCTCCCCTCCTGGGGTT | |
| | GTAAGTTTTGTTCATTCATGAGGGCCGACTGCATTTCCTGGTTACTCTATCCCAGTGACCAGCCACAGGA | |
| | GATGTCCAATAAAGTATGTGATGAAATGGTCTTAAAAAAAAAAAAAA | |
| CLDN3 | AGCCCAGTCGCCGCCGCCCGCCCACAAAGCCACAGGCAGGTGCAGGCGCAGCCGCGGCGAGAGCGTATGG | 199 |
| NM_001306.3 | AGCCGAGCCGTTAGCGCGCGCCGTCGGTGAGTCAGTCCGTCCGTCCGTCCGTCCGTCGGGGCGCCGCAGC | |
| | TCCCGCCAGGCCCAGCGGCCCCGGCCCCTCGTCTCCCCGCACCCGGAGCCACCCGGTGGAGCGGGCCTTG | |
| | CCGCGGCAGCCATGTCCATGGGCCTGGAGATCACGGGCACCGCGCTGGCCGTGCTGGGCTGGCTGGGCAC | |
| | CATCGTGTGCTGCGCGTTGCCCATGTGGCGCGTGTCGGCCTTCATCGGCAGCAACATCATCACGTCGCAG | |
| | AACATCTGGGAGGGCCTGTGGATGAACTGCGTGGTGCAGAGCACCGGCCAGATGCAGTGCAAGGTGTACG | |
| | ACTCGCTGCTGGCACTGCCACAGGACCTTCAGGCGGCCCGCGCCCTCATCGTGGTGGCCATCCTGCTGGC | |
| | CGCCTTCGGGCTGCTAGTGGCGCTGGTGGGCGCCCAGTGCACCAACTGCGTGCAGGACGACACGGCCAAG | |
| | GCCAAGATCACCATCGTGGCAGGCGTGCTGTTCCTTCTCGCCGCCCTGCTCACCCTCGTGCCGGTGTCCT | |
| | GGTCGGCCAACACCATTATCCGGGACTTCTACAACCCCGTGGTGCCCGAGGCGCAGAAGCGCGAGATGGG | |
| | CGCGGGCCTGTACGTGGGCTGGGCGGCCGCGGCGCTGCAGCTGCTGGGGGGCGCGCTGCTCTGCTGCTCG | |
| | TGTCCCCCACGCGAGAAGAAGTACACGGCCACCAAGGTCGTCTACTCCGCGCCGCGCTCCACCGGCCCGG | |
| | GAGCCAGCCTGGGCACAGGCTACGACCGCAAGGACTACGTCTAAGGGACAGACGCAGGGAGACCCCACCA | |
| | CCACCACCACCACCAACACCACCACCACCACCGCGAGCTGGAGCGCGCACCAGGCCATCCAGCGTGCAGC | |
| | CTTGCCTCGGAGGCCAGCCCACCCCCAGAAGCCAGGAAGCCCCCGCGCTGGACTGGGGCAGCTTCCCCAG | |
| | CAGCCACGGCTTTGCGGGCCGGGCAGTCGACTTCGGGGCCCAGGGACCAACCTGCATGGACTGTGAAACC | |
| | TCACCCTTCTGGAGCACGGGGCCTGGGTGACCGCCAATACTTGACCACCCCGTCGAGCCCCATCGGGCCG | |
| | CTGCCCCCATGCTCGCGCTGGGCAGGGACCGGCAGCCCTGGAAGGGGCACTTGATATTTTTCAATAAAAG | |
| | CCTTTCGTTTTGCAAAAAAAAAAAAAAAAAAAAAAAAAAAAAAAAAAAAAAAAAAAAA | |
| CLDN4 | AAAAGTGCCTTTGTTGGCCTGGGCTCAGGAATCCAGAGAAACTGGTCAGGAGGAGGCCCCAGTGACAAAA | 200 |
| NM_001305.3 | ACCCCTCCCTCTGCCCCCGCCCCTCTGCCAGAGCCATATAACTGCTCAACCTGTCCCCGAGAGAGAGTGC | |
| | CCTGGCAGCTGTCGGCTGGAAGGAACTGGTCTGCTCACACTTGCTGGCTTGCGCATCAGGACTGGCTTTA | |
| | TCTCCTGACTCACGGTGCAAAGGTGCACTCTGCGAACGTTAAGTCCGTCCCCAGCGCTTGGAATCCTACG | |
| | GCCCCCACAGCCGGATCCCCTCAGCCTTCCAGGTCCTCAACTCCCGTGGACGCTGAACAATGGCCTCCAT | |
| | GGGGCTACAGGTAATGGGCATCGCGCTGGCCGTCCTGGGCTGGCTGGCCGTCATGCTGTGCTGCGCGCTG | |
| | CCCATGTGGCGCGTGACGGCCTTCATCGGCAGCAACATTGTCACCTCGCAGACCATCTGGGAGGGCCTAT | |
| | GGATGAACTGCGTGGTGCAGAGCACCGGCCAGATGCAGTGCAAGGTGTACGACTCGCTGCTGGCACTGCC | |
| | GCAGGACCTGCAGGCGGCCCGCGCCCTCGTCATCATCAGCATCATCGTGGCTGCTCTGGGCGTGCTGCTG | |
| | TCCGTGGTGGGGGGCAAGTGTACCAACTGCCTGGAGGATGAAAGCGCCAAGGCCAAGACCATGATCGTGG | |
| | CGGGCGTGGTGTTCCTGTTGGCCGGCCTTATGGTGATAGTGCCGGTGTCCTGGACGGCCCACAACATCAT | |
| | CCAAGACTTCTACAATCCGCTGGTGGCCTCCGGGCAGAAGCGGGAGATGGGTGCCTCGCTCTACGTCGGC | |
| | TGGGCCGCCTCCGGCCTGCTGCTCCTTGGCGGGGGGCTGCTTTGCTGCAACTGTCCACCCCGCACAGACA | |
| | AGCCTTACTCCGCCAAGTATTCTGCTGCCCGCTCTGCTGCTGCCAGCAACTACGTGTAAGGTGCCACGGC | |
| | TCCACTCTGTTCCTCTCTGCTTTGTTCTTCCCTGGACTGAGCTCAGCGCAGGCTGTGACCCCAGGAGGGC | |
| | CCTGCCACGGGCCACTGGCTGCTGGGGACTGGGGACTGGGCAGAGACTGAGCCAGGCAGGAAGGCAGCAG | |
| | CCTTCAGCCTCTCTGGCCCACTCGGACAACTTCCCAAGGCCGCCTCCTGCTAGCAAGAACAGAGTCCACC | |
| | CTCCTCTGGATATTGGGGAGGGACGGAAGTGACAGGGTGTGGTGGTGGAGTGGGGAGCTGGCTTCTGCTG | |
| | GCCAGGATAGCTTAACCCTGACTTTGGGATCTGCCTGCATCGGCGTTGGCCACTGTCCCCATTTACATTT | |
| | TCCCCACTCTGTCTGCCTGCATCTCCTCTGTTCCGGGTAGGCCTTGATATCACCTCTGGGACTGTGCCTT | |
| | GCTCACCGAAACCCGCGCCCAGGAGTATGGCTGAGGCCTTGCCCACCCACCTGCCTGGGAAGTGCAGAGT | |
| | GGATGGACGGGTTTAGAGGGGAGGGGCGAAGGTGCTGTAAACAGGTTTGGGCAGTGGTGGGGGAGGGGGC | |
| | CAGAGAGGCGGCTCAGGTTGCCCAGCTCTGTGGCCTCAGGACTCTCTGCCTCACCCGCTTCAGCCCAGGG | |
| | CCCCTGGAGACTGATCCCCTCTGAGTCCTCTGCCCCTTCCAAGGACACTAATGAGCCTGGGAGGGTGGCA | |
| | GGGAGGAGGGGACAGCTTCACCCTTGGAAGTCCTGGGGTTTTTCCTCTTCCTTCTTTGTGGTTTCTGTTT | |
| | TGTAATTTAAGAAGAGCTATTCATCACTGTAATTATTATTATTTTCTACAATAAATGGGACCTGTGCACA | |
| | GGAAAAAAAAAAAAAAAAAAAAAAAA | |
| CRYAB | GACCCCTCACACTCACCTAGCCACCATGGACATCGCCATCCACCACCCCTGGATCCGCCGCCCCTTCTTT | 201 |
| NM_001885.1 | CCTTTCCACTCCCCCAGCCGCCTCTTTGACCAGTTCTTCGGAGAGCACCTGTTGGAGTCTGATCTTTTCC | |
| | CGACGTCTACTTCCCTGAGTCCCTTCTACCTTCGGCCACCCTCCTTCCTGCGGGCACCCAGCTGGTTTGA | |
| | CACTGGACTCTCAGAGATGCGCCTGGAGAAGGACAGGTTCTCTGTCAACCTGGATGTGAAGCACTTCTCC | |
| | CCAGAGGAACTCAAAGTTAAGGTGTTGGGAGATGTGATTGAGGTGCATGGAAAACATGAAGAGCGCCAGG | |
| | ATGAACATGGTTTCATCTCCAGGGAGTTCCACAGGAAATACCGGATCCCAGCTGATGTAGACCCTCTCAC | |
| | CATTACTTCATCCCTGTCATCTGATGGGGTCCTCACTGTGAATGGACCAAGGAAACAGGTCTCTGGCCCT | |
| | GAGCGCACCATTCCCATCACCCGTGAAGAGAAGCCTGCTGTCACCGCAGCCCCCAAGAAATAGATGCCCT | |
| | TTCTTGAATTGCATTTTTTAAAACAAGAAAGTTTCCCCACCAGTGAATGAAAGTCTTGTGACTAGTGCTG | |
| | AAGCTTATTAATGCTAAGGGCAGGCCCAAATTATCAAGCTAATAAAATATCATTCAGCAAC | |
| CTPS (actually | TCCCTCGCCCGGAGGCAGAGATGCGCTGGCGCATCACCGCCAGGAGCCCACAGTGAAAGACCATCGGATG | 202 |
| CTPS1) | GAAGGCGACGCCCAGAACTCCAGGAGACCGCTGTGGGAGGACGCGAGGCCAGGTGACGAATAGGCCAGGC | |
| NM_001905.2 | GTGAGTTCCCAAACAGCCTCCTCCCCTTCAAGAGAGTAAGCTTGGGCCACAGGCTGGGACGGAAGCAGAG | |
| | GGGCAGACACGCCACCACCCGCCCGGCCTCGAACCTACGGCGGCACAGTTCAGCGGAGGCGGCCCAGCGG | |
| | TCCTGTCCCGCGCCTGCGCACTCCAGGCCCCGCCCCGCCCCGCGCCCTCCAGGCCCGGCCCGCCCTCCAA | |
| | CCTCTGCGTGCGCACAGCCTAGAGCCCGCCTCCGTGAAAGACTGCCGGGCGCATGCGGTCGGGGTTGTTC | |
| | ACTGGCTGTCCGGGGCTCCGCGCGCGTCGCCGGCCCAGCTCTGTCGCTGACGGGAGGATCTGAAGCCGGC | |
| | CGCAGGTCAAAGAGTAAAATGAAGTACATTCTGGTTACTGGTGGTGTTATATCAGGAATTGGAAAAGGAA | |
| | TCATTGCCAGCAGTGTGGGCACAATACTCAAGTCATGTGGTTTACATGTAACTTCAATCAAAATTGACCC | |
| | CTACATTAACATTGATGCAGGAACATTCTCTCCTTATGAGCATGGTGAGGTTTTTGTGCTGGATGATGGT | |
| | GGGGAAGTAGACCTTGACCTGGGTAACTATGAGCGGTTCCTTGACATCCGCCTCACCAAGGACAATAATC | |
| | TGACCACTGGAAAGATATACCAGTATGTCATTAACAAGGAACGGAAAGGAGATTACTTGGGGAAAACTGT | |
| | CCAAGTTGTCCCTCATATCACAGATGCAATCCAGGAGTGGGTGATGAGACAGGCGTTAATACCTGTAGAT | |
| | GAAGATGGCCTGGAACCTCAAGTGTGTGTTATTGAGCTTGGTGGAACCGTGGGGGACATAGAAAGCATGC | |
| | CCTTTATTGAGGCCTTCCGTCAGTTCCAATTCAAGGTCAAAAGAGAGAACTTTTGTAACATCCACGTCAG | |
| | TCTAGTTCCCCAGCCAAGTTCAACAGGGGAACAGAAGACTAAACCTACCCAGAATAGTGTTCGGGAACTT | |
| | AGAGGACTTGGGCTTTCCCCAGATCTGGTTGTATGCAGGTGCTCAAATCCACTTGACACATCAGTGAAGG | |
| | AGAAAATATCAATGTTCTGCCATGTTGAGCCTGAACAAGTGATCTGTGTCCACGATGTCTCATCCATCTA | |
| | CCGAGTCCCCTTGTTGTTAGAGGAGCAAGGGGTTGTAGATTATTTTCTTCGAAGACTTGACCTTCCTATT | |
| | GAGAGGCAGCCAAGAAAAATGCTGATGAAATGGAAAGAGATGGCTGACAGATATGATCGCTTGCTGGAGA | |
| | CCTGCTCTATTGCCCTTGTGGGCAAATACACGAAGTTCTCAGACTCCTATGCCTCTGTCATTAAGGCTCT | |
| | GGAGCATTCTGCACTGGCCATCAACCACAAATTGGAAATCAAGTACATAGATTCTGCGGACTTGGAGCCC | |
| | ATCACCTCGCAAGAAGAGCCCGTGCGCTACCACGAAGCTTGGCAGAAGCTCTGTAGTGCTCATGGAGTGC | |
| | TGGTTCCAGGAGGATTTGGTGTTCGAGGAACAGAAGGAAAAATCCAAGCAATTGCCTGGGCTCGGAATCA | |
| | GAAAAAGCCTTTTTTGGGCGTGTGCTTAGGGATGCAGTTGGCAGTGGTTGAATTCTCAAGAAACGTGCTG | |
| | GGATGGCAAGATGCCAATTCTACAGAGTTTGACCCTACGACCAGTCATCCCGTGGTCGTAGACATGCCAG | |
| | AACACAACCCAGGGCAGATGGGCGGAACCATGAGGCTGGGCAAGAGGAGAACCCTGTTCCAGACCAAGAA | |
| | CTCAGTCATGAGGAAACTCTATGGAGACGCAGACTACTTGGAAGAGAGGCACCGCCACCGATTTGAGGTG | |
| | AATCCAGTCTGGAAAAAGTGTTTGGAAGAACAAGGCTTGAAGTTTGTTGGCCAAGATGTTGAAGGAGAGA | |
| | GAATGGAAATTGTGGAGTTAGAAGATCATCCCTTTTTTGTTGGGGTTCAGTACCACCCTGAGTTCCTGTC | |
| | CAGGCCTATCAAGCCCTCCCCACCATACTTTGGCCTCCTCCTGGCCTCTGTGGGGCGGCTCTCACATTAC | |
| | CTCCAGAAAGGCTGCAGGCTCTCACCCAGGGACACCTATAGTGACAGGAGTGGAAGCAGCTCCCCTGACT | |
| | CTGAAATCACCGAACTGAAGTTTCCATCAATAAATCATGACTGATCTTGTAGCGGATGATTCTTCAAGAG | |
| | ACCCTTCAAACTTGGGTAGAGTTTACAGCTCTGACTTTACACTCGGCTTTGGAGACTTTCTTTAAATTAT | |
| | GTTTTTATTAAGATTATTTTATTATGCGGAAAGGTATTTGGGAAACTTGTCACTTGCATGTCCCATCACG | |
| | TGTACTGGCTCCTCTGTGGTGTCTGCCTGTTGCGTGACACTCTCCTTGCAGTTCTTGAGTTGCGGCAGAA | |
| | CATCGCGATGGGAACCGATGGTGGGTGGGGCTGCAGAGTGCCCCATCGGTCACCTTGTTTCTCAACTACC | |
| | TCGCATCATTGCAGATGCTAGCGCGTTGCCTGTCGCTTTCCCTTGGATACCTAGACCGTTATAAAGTGTG | |
| | CCACATGGACTTACCGAGCATGGAGAGAGGATTTTAGCTAGGATTTGAACACTTGGTGCTGGGAACCTCA | |
| | GGGTATTGCTTGCCACTAAGCCATGAAACCAGAGACAAAATCTCTATACTGCCCTGAGTTGGGGGGAATT | |
| | CTCAGTGCCAACTGTGGCTGGTCCTCATTCAAAGGGACGGTCAGTTTGGTGTCAACATGAAACACCAAGA | |
| | TGTCTGTCTCTGAAGCGTGATTTTAAAATCCCCATGCCTGTGGCTGCGCTTCCTATTTCTAGGGCTGGGA | |
| | AACACTCCTTGCATCAAGGGGTCACTTACAGAACAAAGAATCTTTTGGGGGAAACTTCCTCTAAAACCCT | |
| | CTCATATATAGACAGCTTTGACTGGAGGGTCCATTTTTCTTCCAGGATGGTGTTACTGCAGTTGAAAGGG | |
| | CAATATGAAGTTACTTTCTTAATGTGACCTAGCAATAGGCATAGCTACGTGGCACTATATTCTGGCCAGA | |
| | CTCGATGTGTACTCTAACTTAAGAAATAAATCAGTAAGGCAGAACAAGAAAAAAAAAAAAAAAAAAA | |
| GSDML | ATGTTCAGCGTATTTGAGGAAATCACAAGAATTGTAGTTAAGGAGATGGATGCTGGAGGGGATATGATTG | 203 |
| EU526753.1 | CCGTTAGAAGCCTTGTTGATGCTGATAGATTCCGCTGCTTCCATCTGGTGGGGGAGAAGAGAACTTTCTT | |
| | TGGATGCCGGCACTACACAACAGGCCTCACCCTGATGGACATTCTGGACACAGATGGGGACAAGTGGTTA | |
| | GATGAACTGGATTCTGGGCTCCAAGGTCAAAAGGCTGAGTTTCAAATTCTGGATAATGTAGACTCAACGG | |
| | GAGAGTTGATAGTGAGATTACCCAAAGAAATAACAATTTCAGGCAGTTTCCAGGGCTTCCACCATCAGAA | |
| | AATCAAGATATCGGAGAACCGGATATCCCAGCAGTATCTGGCTACCCTTGAAAACAGGAAGCTGAAGAGG | |
| | GAACTACCCTTTTCATTCCGATCAATTAATACGAGAGAAAACCTGTATCTGGTGACAGAAACTCTGGAGA | |
| | CGGTAAAGGAGGAAACCCTGAAAAGCGACCGGCAATATAAATTTTGGAGCCAGATCTCTCAGGGCCATCT | |
| | CAGCTATAAACACAAGGGCCAAAGGGAAGTGACCATCCCCCCAAATCGGGTCCTGAGCTATCGAGTAAAG | |
| | CAGCTTGTCTTCCCCAACAAGGAGACGATGAAGAAGGATGGTGCTTCATCCTGTTTAGGAAAGTCTTTGG | |
| | GTTCGGAGGATTCCAGAAACATGAAGGAGAAGTTGGAGGACATGGAGAGTGTCCTCAAGGACCTGACAGA | |
| | GGAGAAGAGAAAAGATGTGCTAAACTCCCTCGCTAAGTGCCTCGGCAAGGAGGATATTCGGCAGGATCTA | |
| | GAGCAAAGAGTATCTGAGGTCCTGATTTCCAGGGAGCTACACATGGAGGACTCAGACAAGCCTCTCCTAA | |
| | GCAGCCTTTTTAATGCTGCTGGGGTCTTGGTAGAAGCGCGTGCAAAAGCCATTCTGGACTTCCTGGATGC | |
| | CCTGCTAGAGCTGTCTGAAGAGCAGCAGTTTGTGGCTGAGGCCCTGGAGAAGGGGACCCTTCCTCTGTTG | |
| | AAGGACCAGGTGAAATCTGTCATGGAGCAGAACTGGGATGAGCTGGCCAGCAGTCCTCCTGACATGGACT | |
| | ATGACCCTGAGGCACGAATTCTCTGTGCGCTGTATGTTGTTGTCTCTATCCTGCTGGAGCTGGCTGAGGG | |
| | GCCTACCTCTGTCTCTTCCTAA | |
| KRT14 | ACCCGAGCACCTTCTCTTCACTCAGCCAACTGCTCGCTCGCTCACCTCCCTCCTCTGCACCATGACCACC | 204 |
| NM_000526.4 | TGCAGCCGCCAGTTCACCTCCTCCAGCTCCATGAAGGGCTCCTGCGGCATCGGGGGCGGCATCGGGGGCG | |
| | GCTCCAGCCGCATCTCCTCCGTCCTGGCCGGAGGGTCCTGCCGCGCCCCCAGCACCTACGGGGGCGGCCT | |
| | GTCTGTCTCATCCTCCCGCTTCTCCTCTGGGGGAGCCTACGGGCTGGGGGGCGGCTATGGCGGTGGCTTC | |
| | AGCAGCAGCAGCAGCAGCTTTGGTAGTGGCTTTGGGGGAGGATATGGTGGTGGCCTTGGTGCTGGCTTGG | |
| | GTGGTGGCTTTGGTGGTGGCTTTGCTGGTGGTGATGGGCTTCTGGTGGGCAGTGAGAAGGTGACCATGCA | |
| | GAACCTCAATGACCGCCTGGCCTCCTACCTGGACAAGGTGCGTGCTCTGGAGGAGGCCAACGCCGACCTG | |
| | GAAGTGAAGATCCGTGACTGGTACCAGAGGCAGCGGCCTGCTGAGATCAAAGACTACAGTCCCTACTTCA | |
| | AGACCATTGAGGACCTGAGGAACAAGATTCTCACAGCCACAGTGGACAATGCCAATGTCCTTCTGCAGAT | |
| | TGACAATGCCCGTCTGGCCGCGGATGACTTCCGCACCAAGTATGAGACAGAGTTGAACCTGCGCATGAGT | |
| | GTGGAAGCCGACATCAATGGCCTGCGCAGGGTGCTGGACGAACTGACCCTGGCCAGAGCTGACCTGGAGA | |
| | TGCAGATTGAGAGCCTGAAGGAGGAGCTGGCCTACCTGAAGAAGAACCACGAGGAGGAGATGAATGCCCT | |
| | GAGAGGCCAGGTGGGTGGAGATGTCAATGTGGAGATGGACGCTGCACCTGGCGTGGACCTGAGCCGCATT | |
| | CTGAACGAGATGCGTGACCAGTATGAGAAGATGGCAGAGAAGAACCGCAAGGATGCCGAGGAATGGTTCT | |
| | TCACCAAGACAGAGGAGCTGAACCGCGAGGTGGCCACCAACAGCGAGCTGGTGCAGAGCGGCAAGAGCGA | |
| | GATCTCGGAGCTCCGGCGCACCATGCAGAACCTGGAGATTGAGCTGCAGTCCCAGCTCAGCATGAAAGCA | |
| | TCCCTGGAGAACAGCCTGGAGGAGACCAAAGGTCGCTACTGCATGCAGCTGGCCCAGATCCAGGAGATGA | |
| | TTGGCAGCGTGGAGGAGCAGCTGGCCCAGCTCCGCTGCGAGATGGAGCAGCAGAACCAGGAGTACAAGAT | |
| | CCTGCTGGACGTGAAGACGCGGCTGGAGCAGGAGATCGCCACCTACCGCCGCCTGCTGGAGGGCGAGGAC | |
| | GCCCACCTCTCCTCCTCCCAGTTCTCCTCTGGATCGCAGTCATCCAGAGATGTGACCTCCTCCAGCCGCC | |
| | AAATCCGCACCAAGGTCATGGATGTGCACGATGGCAAGGTGGTGTCCACCCACGAGCAGGTCCTTCGCAC | |
| | CAAGAACTGAGGCTGCCCAGCCCCGCTCAGGCCTAGGAGGCCCCCCGTGTGGACACAGATCCCACTGGAA | |
| | GATCCCCTCTCCTGCCCAAGCACTTCACAGCTGGACCCTGCTTCACCCTCACCCCCTCCTGGCAATCAAT | |
| | ACAGCTTCATTATCTGAGTTGCATAAAAAAAAAAAAAAAAAAA | |
| KRT19 | AGATATCCGCCCCTGACACCATTCCTCCCTTCCCCCCTCCACCGGCCGCGGGCATAAAAGGCGCCAGGTG | 205 |
| NM_002276.4 | AGGGCCTCGCCGCTCCTCCCGCGAATCGCAGCTTCTGAGACCAGGGTTGCTCCGTCCGTGCTCCGCCTCG | |
| | CCATGACTTCCTACAGCTATCGCCAGTCGTCGGCCACGTCGTCCTTCGGAGGCCTGGGCGGCGGCTCCGT | |
| | GCGTTTTGGGCCGGGGGTCGCCTTTCGCGCGCCCAGCATTCACGGGGGCTCCGGCGGCCGCGGCGTATCC | |
| | GTGTCCTCCGCCCGCTTTGTGTCCTCGTCCTCCTCGGGGGCCTACGGCGGCGGCTACGGCGGCGTCCTGA | |
| | CCGCGTCCGACGGGCTGCTGGCGGGCAACGAGAAGCTAACCATGCAGAACCTCAACGACCGCCTGGCCTC | |
| | CTACCTGGACAAGGTGCGCGCCCTGGAGGCGGCCAACGGCGAGCTAGAGGTGAAGATCCGCGACTGGTAC | |
| | CAGAAGCAGGGGCCTGGGCCCTCCCGCGACTACAGCCACTACTACACGACCATCCAGGACCTGCGGGACA | |
| | AGATTCTTGGTGCCACCATTGAGAACTCCAGGATTGTCCTGCAGATCGACAATGCCCGTCTGGCTGCAGA | |
| | TGACTTCCGAACCAAGTTTGAGACGGAACAGGCTCTGCGCATGAGCGTGGAGGCCGACATCAACGGCCTG | |
| | CGCAGGGTGCTGGATGAGCTGACCCTGGCCAGGACCGACCTGGAGATGCAGATCGAAGGCCTGAAGGAAG | |
| | AGCTGGCCTACCTGAAGAAGAACCATGAGGAGGAAATCAGTACGCTGAGGGGCCAAGTGGGAGGCCAGGT | |
| | CAGTGTGGAGGTGGATTCCGCTCCGGGCACCGATCTCGCCAAGATCCTGAGTGACATGCGAAGCCAATAT | |
| | GAGGTCATGGCCGAGCAGAACCGGAAGGATGCTGAAGCCTGGTTCACCAGCCGGACTGAAGAATTGAACC | |
| | GGGAGGTCGCTGGCCACACGGAGCAGCTCCAGATGAGCAGGTCCGAGGTTACTGACCTGCGGCGCACCCT | |
| | TCAGGGTCTTGAGATTGAGCTGCAGTCACAGCTGAGCATGAAAGCTGCCTTGGAAGACACACTGGCAGAA | |
| | ACGGAGGCGCGCTTTGGAGCCCAGCTGGCGCATATCCAGGCGCTGATCAGCGGTATTGAAGCCCAGCTGG | |
| | GCGATGTGCGAGCTGATAGTGAGCGGCAGAATCAGGAGTACCAGCGGCTCATGGACATCAAGTCGCGGCT | |
| | GGAGCAGGAGATTGCCACCTACCGCAGCCTGCTCGAGGGACAGGAAGATCACTACAACAATTTGTCTGCC | |
| | TCCAAGGTCCTCTGAGGCAGCAGGCTCTGGGGCTTCTGCTGTCCTTTGGAGGGTGTCTTCTGGGTAGAGG | |
| | GATGGGAAGGAAGGGACCCTTACCCCCGGCTCTTCTCCTGACCTGCCAATAAAAATTTATGGTCCAAGGG | |
| | AAAAAAAAAAAAAAAAAAAA | |
| KRT8 | ATTCAGCAAATGTTTGCGGAATGAATGGGGTGAGCTGGAGCCAGGACCTGCAGGAAGGGATCTCCGCCTG | 206 |
| NM_001256282.1 | GTTCGGCCCGCCTGCCTCCACTCCTGCCTCTACCATGTCCATCAGGGTGACCCAGAAGTCCTACAAGGTG | |
| | TCCACCTCTGGCCCCCGGGCCTTCAGCAGCCGCTCCTACACGAGTGGGCCCGGTTCCCGCATCAGCTCCT | |
| | CGAGCTTCTCCCGAGTGGGCAGCAGCAACTTTCGCGGTGGCCTGGGCGGCGGCTATGGTGGGGCCAGCGG | |
| | CATGGGAGGCATCACCGCAGTTACGGTCAACCAGAGCCTGCTGAGCCCCCTTGTCCTGGAGGTGGACCCC | |
| | AACATCCAGGCCGTGCGCACCCAGGAGAAGGAGCAGATCAAGACCCTCAACAACAAGTTTGCCTCCTTCA | |
| | TAGACAAGGTACGGTTCCTGGAGCAGCAGAACAAGATGCTGGAGACCAAGTGGAGCCTCCTGCAGCAGCA | |
| | GAAGACGGCTCGAAGCAACATGGACAACATGTTCGAGAGCTACATCAACAACCTTAGGCGGCAGCTGGAG | |
| | ACTCTGGGCCAGGAGAAGCTGAAGCTGGAGGCGGAGCTTGGCAACATGCAGGGGCTGGTGGAGGACTTCA | |
| | AGAACAAGTATGAGGATGAGATCAATAAGCGTACAGAGATGGAGAACGAATTTGTCCTCATCAAGAAGGA | |
| | TGTGGATGAAGCTTACATGAACAAGGTAGAGCTGGAGTCTCGCCTGGAAGGGCTGACCGACGAGATCAAC | |
| | TTCCTCAGGCAGCTATATGAAGAGGAGATCCGGGAGCTGCAGTCCCAGATCTCGGACACATCTGTGGTGC | |
| | TGTCCATGGACAACAGCCGCTCCCTGGACATGGACAGCATCATTGCTGAGGTCAAGGCACAGTACGAGGA | |
| | TATTGCCAACCGCAGCCGGGCTGAGGCTGAGAGCATGTACCAGATCAAGTATGAGGAGCTGCAGAGCCTG | |
| | GCTGGGAAGCACGGGGATGACCTGCGGCGCACAAAGACTGAGATCTCTGAGATGAACCGGAACATCAGCC | |
| | GGCTCCAGGCTGAGATTGAGGGCCTCAAAGGCCAGAGGGCTTCCCTGGAGGCCGCCATTGCAGATGCCGA | |
| | GCAGCGTGGAGAGCTGGCCATTAAGGATGCCAACGCCAAGTTGTCCGAGCTGGAGGCCGCCCTGCAGCGG | |
| | GCCAAGCAGGACATGGCGCGGCAGCTGCGTGAGTACCAGGAGCTGATGAACGTCAAGCTGGCCCTGGACA | |
| | TCGAGATCGCCACCTACAGGAAGCTGCTGGAGGGCGAGGAGAGCCGGCTGGAGTCTGGGATGCAGAACAT | |
| | GAGTATTCATACGAAGACCACCAGCGGCTATGCAGGTGGTCTGAGCTCGGCCTATGGGGGCCTCACAAGC | |
| | CCCGGCCTCAGCTACAGCCTGGGCTCCAGCTTTGGCTCTGGCGCGGGCTCCAGCTCCTTCAGCCGCACCA | |
| | GCTCCTCCAGGGCCGTGGTTGTGAAGAAGATCGAGACACGTGATGGGAAGCTGGTGTCTGAGTCCTCTGA | |
| | CGTCCTGCCCAAGTGAACAGCTGCGGCAGCCCCTCCCAGCCTACCCCTCCTGCGCTGCCCCAGAGCCTGG | |
| | GAAGGAGGCCGCTATGCAGGGTAGCACTGGGAACAGGAGACCCACCTGAGGCTCAGCCCTAGCCCTCAGC | |
| | CCACCTGGGGAGTTTACTACCTGGGGACCCCCCTTGCCCATGCCTCCAGCTACAAAACAATTCAATTGCT | |
| | TTTTTTTTTTGGTCCAAAATAAAACCTCAGCTAGCTCTGCCAATGTCAAAAAAAAAA | |
| RARRES3 | ATTCTCTCCTTCAGCATAAAAGCTGATCCACAAACAAGAGGAGCACCAGACCTCCTCTTGGCTTCGAGAT | 207 |
| NM_004585.3 | GGCTTCGCCACACCAAGAGCCCAAACCTGGAGACCTGATTGAGATTTTCCGCCTTGGCTATGAGCACTGG | |
| | GCCCTGTATATAGGAGATGGCTACGTGATCCATCTGGCTCCTCCAAGTGAGTACCCCGGGGCTGGCTCCT | |
| | CCAGTGTCTTCTCAGTCCTGAGCAACAGTGCAGAGGTGAAACGGGAGCGCCTGGAAGATGTGGTGGGAGG | |
| | CTGTTGCTATCGGGTCAACAACAGCTTGGACCATGAGTACCAACCACGGCCCGTGGAGGTGATCATCAGT | |
| | TCTGCGAAGGAGATGGTTGGTCAGAAGATGAAGTACAGTATTGTGAGCAGGAACTGTGAGCACTTTGTCA | |
| | CCCAGCTGAGATATGGCAAGTCCCGCTGTAAACAGGTGGAAAAGGCCAAGGTTGAAGTTGGTGTGGCCAC | |
| | GGCGCTTGGAATCCTGGTTGTTGCTGGATGCTCTTTTGCGATTAGGAGATACCAAAAAAAAGCGACAGCC | |
| | TGAAGCAGCCACAAAATCCTGTGTTAGAAGCAGCTGTGGGGGTCCCAGTGGAGATGAGCCTCCCCCATGC | |
| | CTCCAGCAGCCTGACCCTCGTGCCCTGTCTCAGGCGTTCTCTAGATCCTTTCCTCTGTTTCCCTCTCTCG | |
| | CTGGCAAAAGTATGATCTAATTGAAACAAGACTGAAGGATCAATAAACAGCCATCTGCCCCTTCAAAAAA | |
| | AAAAAAAAA | |
| TRIM29 | CTCCTCACAGGTGTGTCTCTAGTCCTCGTGGTTGCCTGCCCCACTCCCTGCCGAGACGCCTGCCAGAAAG | 208 |
| NM_012101.3 | GTCACCTATCCTGAACCCCAGCAAGCCTGAAACAGCTCAGCCAAGCACCCTGCGATGGAAGCTGCAGATG | |
| | CCTCCAGGAGCAACGGGTCGAGCCCAGAAGCCAGGGATGCCCGGAGCCCGTCGGGCCCCAGTGGCAGCCT | |
| | GGAGAATGGCACCAAGGCTGACGGCAAGGATGCCAAGACCACCAACGGGCACGGCGGGGAGGCAGCTGAG | |
| | GGCAAGAGCCTGGGCAGCGCCCTGAAGCCAGGGGAAGGTAGGAGCGCCCTGTTCGCGGGCAATGAGTGGC | |
| | GGCGACCCATCATCCAGTTTGTCGAGTCCGGGGACGACAAGAACTCCAACTACTTCAGCATGGACTCTAT | |
| | GGAAGGCAAGAGGTCGCCGTACGCAGGGCTCCAGCTGGGGGCTGCCAAGAAGCCACCCGTTACCTTTGCC | |
| | GAAAAGGGCGAGCTGCGCAAGTCCATTTTCTCGGAGTCCCGGAAGCCCACGGTGTCCATCATGGAGCCCG | |
| | GGGAGACCCGGCGGAACAGCTACCCCCGGGCCGACACGGGCCTTTTTTCACGGTCCAAGTCCGGCTCCGA | |
| | GGAGGTGCTGTGCGACTCCTGCATCGGCAACAAGCAGAAGGCGGTCAAGTCCTGCCTGGTGTGCCAGGCC | |
| | TCCTTCTGCGAGCTGCATCTCAAGCCCCACCTGGAGGGCGCCGCCTTCCGAGACCACCAGCTGCTCGAGC | |
| | CCATCCGGGACTTTGAGGCCCGCAAGTGTCCCGTGCATGGCAAGACGATGGAGCTCTTCTGCCAGACCGA | |
| | CCAGACCTGCATCTGCTACCTTTGCATGTTCCAGGAGCACAAGAATCATAGCACCGTGACAGTGGAGGAG | |
| | GCCAAGGCCGAGAAGGAGACGGAGCTGTCATTGCAAAAGGAGCAGCTGCAGCTCAAGATCATTGAGATTG | |
| | AGGATGAAGCTGAGAAGTGGCAGAAGGAGAAGGACCGCATCAAGAGCTTCACCACCAATGAGAAGGCCAT | |
| | CCTGGAGCAGAACTTCCGGGACCTGGTGCGGGACCTGGAGAAGCAAAAGGAGGAAGTGAGGGCTGCGCTG | |
| | GAGCAGCGGGAGCAGGATGCTGTGGACCAAGTGAAGGTGATCATGGATGCTCTGGATGAGAGAGCCAAGG | |
| | TGCTGCATGAGGACAAGCAGACCCGGGAGCAGCTGCATAGCATCAGCGACTCTGTGTTGTTTCTGCAGGA | |
| | ATTTGGTGCATTGATGAGCAATTACTCTCTCCCCCCACCCCTGCCCACCTATCATGTCCTGCTGGAGGGG | |
| | GAGGGCCTGGGACAGTCACTAGGCAACTTCAAGGACGACCTGCTCAATGTATGCATGCGCCACGTTGAGA | |
| | AGATGTGCAAGGCGGACCTGAGCCGTAACTTCATTGAGAGGAACCACATGGAGAACGGTGGTGACCATCG | |
| | CTATGTGAACAACTACACGAACAGCTTCGGGGGTGAGTGGAGTGCACCGGACACCATGAAGAGATACTCC | |
| | ATGTACCTGACACCCAAAGGTGGGGTCCGGACATCATACCAGCCCTCGTCTCCTGGCCGCTTCACCAAGG | |
| | AGACCACCCAGAAGAATTTCAACAATCTCTATGGCACCAAAGGTAACTACACCTCCCGGGTCTGGGAGTA | |
| | CTCCTCCAGCATTCAGAACTCTGACAATGACCTGCCCGTCGTCCAAGGCAGCTCCTCCTTCTCCCTGAAA | |
| | GGCTATCCCTCCCTCATGCGGAGCCAAAGCCCCAAGGCCCAGCCCCAGACTTGGAAATCTGGCAAGCAGA | |
| | CTATGCTGTCTCACTACCGGCCATTCTACGTCAACAAAGGCAACGGGATTGGGTCCAACGAAGCCCCATG | |
| | AGCTCCTGGCGGAAGGAACGAGGCGCCACACCCCTGCTCTTCCTCCTGACCCTGCTGCTCTTGCCTTCTA | |
| | AGCTACTGTGCTTGTCTGGGTGGGAGGGAGCCTGGTCCTGCACCTGCCCTCTGCAGCCCTCTGCCAGCCT | |
| | CTTGGGGGCAGTTCCGGCCTCTCCGACTTCCCCACTGGCCACACTCCATTCAGACTCCTTTCCTGCCTTG | |
| | TGACCTCAGATGGTCACCATCATTCCTGTGCTCAGAGGCCAACCCATCACAGGGGTGAGATAGGTTGGGG | |
| | CCTGCCCTAACCCGCCAGCCTCCTCCTCTCGGGCTGGATCTGGGGGCTAGCAGTGAGTACCCGCATGGTA | |
| | TCAGCCTGCCTCTCCCGCCCACGCCCTGCTGTCTCCAGGCCTATAGACGTTTCTCTCCAAGGCCCTATCC | |
| | CCCAATGTTGTCAGCAGATGCCTGGACAGCACAGCCACCCATCTCCCATTCACATGGCCCACCTCCTGCT | |
| | TCCCAGAGGACTGGCCCTACGTGCTCTCTCTCGTCCTACCTATCAATGCCCAGCATGGCAGAACCTGCAG | |
| | CCCTTGGCCACTGCAGATGGAAACCTCTCAGTGTCTTGACATCACCCTACCCAGGCGGTGGGTCTCCACC | |
| | ACAGCCACTTTGAGTCTGTGGTCCCTGGAGGGTGGCTTCTCCTGACTGGCAGGATGACCTTAGCCAAGAT | |
| | ATTCCTCTGTTCCCTCTGCTGAGATAAAGAATTCCCTTAACATGATATAATCCACCCATGCAAATAGCTA | |
| | CTGGCCCAGCTACCATTTACCATTTGCCTACAGAATTTCATTCAGTCTACACTTTGGCATTCTCTCTGGC | |
| | GATGGAGTGTGGCTGGGCTGACCGCAAAAGGTGCCTTACACACTGCCCCCACCCTCAGCCGTTGCCCCAT | |
| | CAGAGGCTGCCTCCTCCTTCTGATTACCCCCCATGTTGCATATCAGGGTGCTCAAGGATTGGAGAGGAGA | |
| | CAAAACCAGGAGCAGCACAGTGGGGACATCTCCCGTCTCAACAGCCCCAGGCCTATGGGGGCTCTGGAAG | |
| | GATGGGCCAGCTTGCAGGGGTTGGGGAGGGAGACATCCAGCTTGGGCTTTCCCCTTTGGAATAAACCATT | |
| | GGTCTGTCAAAAAAAAAAAAAAAAAAA | |
| VEGF | TCGCGGAGGCTTGGGGCAGCCGGGTAGCTCGGAGGTCGTGGCGCTGGGGGCTAGCACCAGCGCTCTGTCG | 209 |
| NM_001025366.2 | GGAGGCGCAGCGGTTAGGTGGACCGGTCAGCGGACTCACCGGCCAGGGCGCTCGGTGCTGGAATTTGATA | |
| | TTCATTGATCCGGGTTTTATCCCTCTTCTTTTTTCTTAAACATTTTTTTTTAAAACTGTATTGTTTCTCG | |
| | TTTTAATTTATTTTTGCTTGCCATTCCCCACTTGAATCGGGCCGACGGCTTGGGGAGATTGCTCTACTTC | |
| | CCCAAATCACTGTGGATTTTGGAAACCAGCAGAAAGAGGAAAGAGGTAGCAAGAGCTCCAGAGAGAAGTC | |
| | GAGGAAGAGAGAGACGGGGTCAGAGAGAGCGCGCGGGCGTGCGAGCAGCGAAAGCGACAGGGGCAAAGTG | |
| | AGTGACCTGCTTTTGGGGGTGACCGCCGGAGCGCGGCGTGAGCCCTCCCCCTTGGGATCCCGCAGCTGAC | |
| | CAGTCGCGCTGACGGACAGACAGACAGACACCGCCCCCAGCCCCAGCTACCACCTCCTCCCCGGCCGGCG | |
| | GCGGACAGTGGACGCGGCGGCGAGCCGCGGGCAGGGGCCGGAGCCCGCGCCCGGAGGCGGGGTGGAGGGG | |
| | GTCGGGGCTCGCGGCGTCGCACTGAAACTTTTCGTCCAACTTCTGGGCTGTTCTCGCTTCGGAGGAGCCG | |
| | TGGTCCGCGCGGGGGAAGCCGAGCCGAGCGGAGCCGCGAGAAGTGCTAGCTCGGGCCGGGAGGAGCCGCA | |
| | GCCGGAGGAGGGGGAGGAGGAAGAAGAGAAGGAAGAGGAGAGGGGGCCGCAGTGGCGACTCGGCGCTCGG | |
| | AAGCCGGGCTCATGGACGGGTGAGGCGGCGGTGTGCGCAGACAGTGCTCCAGCCGCGCGCGCTCCCCAGG | |
| | CCCTGGCCCGGGCCTCGGGCCGGGGAGGAAGAGTAGCTCGCCGAGGCGCCGAGGAGAGCGGGCCGCCCCA | |
| | CAGCCCGAGCCGGAGAGGGAGCGCGAGCCGCGCCGGCCCCGGTCGGGCCTCCGAAACCATGAACTTTCTG | |
| | CTGTCTTGGGTGCATTGGAGCCTTGCCTTGCTGCTCTACCTCCACCATGCCAAGTGGTCCCAGGCTGCAC | |
| | CCATGGCAGAAGGAGGAGGGCAGAATCATCACGAAGTGGTGAAGTTCATGGATGTCTATCAGCGCAGCTA | |
| | CTGCCATCCAATCGAGACCCTGGTGGACATCTTCCAGGAGTACCCTGATGAGATCGAGTACATCTTCAAG | |
| | CCATCCTGTGTGCCCCTGATGCGATGCGGGGGCTGCTGCAATGACGAGGGCCTGGAGTGTGTGCCCACTG | |
| | AGGAGTCCAACATCACCATGCAGATTATGCGGATCAAACCTCACCAAGGCCAGCACATAGGAGAGATGAG | |
| | CTTCCTACAGCACAACAAATGTGAATGCAGACCAAAGAAAGATAGAGCAAGACAAGAAAAAAAATCAGTT | |
| | CGAGGAAAGGGAAAGGGGCAAAAACGAAAGCGCAAGAAATCCCGGTATAAGTCCTGGAGCGTGTACGTTG | |
| | GTGCCCGCTGCTGTCTAATGCCCTGGAGCCTCCCTGGCCCCCATCCCTGTGGGCCTTGCTCAGAGCGGAG | |
| | AAAGCATTTGTTTGTACAAGATCCGCAGACGTGTAAATGTTCCTGCAAAAACACAGACTCGCGTTGCAAG | |
| | GCGAGGCAGCTTGAGTTAAACGAACGTACTTGCAGATGTGACAAGCCGAGGCGGTGAGCCGGGCAGGAGG | |
| | AAGGAGCCTCCCTCAGGGTTTCGGGAACCAGATCTCTCACCAGGAAAGACTGATACAGAACGATCGATAC | |
| | AGAAACCACGCTGCCGCCACCACACCATCACCATCGACAGAACAGTCCTTAATCCAGAAACCTGAAATGA | |
| | AGGAAGAGGAGACTCTGCGCAGAGCACTTTGGGTCCGGAGGGCGAGACTCCGGCGGAAGCATTCCCGGGC | |
| | GGGTGACCCAGCACGGTCCCTCTTGGAATTGGATTCGCCATTTTATTTTTCTTGCTGCTAAATCACCGAG | |
| | CCCGGAAGATTAGAGAGTTTTATTTCTGGGATTCCTGTAGACACACCCACCCACATACATACATTTATAT | |
| | ATATATATATTATATATATATAAAAATAAATATCTCTATTTTATATATATAAAATATATATATTCTTTTT | |
| | TTAAATTAACAGTGCTAATGTTATTGGTGTCTTCACTGGATGTATTTGACTGCTGTGGACTTGAGTTGGG | |
| | AGGGGAATGTTCCCACTCAGATCCTGACAGGGAAGAGGAGGAGATGAGAGACTCTGGCATGATCTTTTTT | |
| | TTGTCCCACTTGGTGGGGCCAGGGTCCTCTCCCCTGCCCAGGAATGTGCAAGGCCAGGGCATGGGGGCAA | |
| | ATATGACCCAGTTTTGGGAACACCGACAAACCCAGCCCTGGCGCTGAGCCTCTCTACCCCAGGTCAGACG | |
| | GACAGAAAGACAGATCACAGGTACAGGGATGAGGACACCGGCTCTGACCAGGAGTTTGGGGAGCTTCAGG | |
| | ACATTGCTGTGCTTTGGGGATTCCCTCCACATGCTGCACGCGCATCTCGCCCCCAGGGGCACTGCCTGGA | |
| | AGATTCAGGAGCCTGGGCGGCCTTCGCTTACTCTCACCTGCTTCTGAGTTGCCCAGGAGACCACTGGCAG | |
| | ATGTCCCGGCGAAGAGAAGAGACACATTGTTGGAAGAAGCAGCCCATGACAGCTCCCCTTCCTGGGACTC | |
| | GCCCTCATCCTCTTCCTGCTCCCCTTCCTGGGGTGCAGCCTAAAAGGACCTATGTCCTCACACCATTGAA | |
| | ACCACTAGTTCTGTCCCCCCAGGAGACCTGGTTGTGTGTGTGTGAGTGGTTGACCTTCCTCCATCCCCTG | |
| | GTCCTTCCCTTCCCTTCCCGAGGCACAGAGAGACAGGGCAGGATCCACGTGCCCATTGTGGAGGCAGAGA | |
| | AAAGAGAAAGTGTTTTATATACGGTACTTATTTAATATCCCTTTTTAATTAGAAATTAAAACAGTTAATT | |
| | TAATTAAAGAGTAGGGTTTTTTTTCAGTATTCTTGGTTAATATTTAATTTCAACTATTTATGAGATGTAT | |
| | CTTTTGCTCTCTCTTGCTCTCTTATTTGTACCGGTTTTTGTATATAAAATTCATGTTTCCAATCTCTCTC | |
| | TCCCTGATCGGTGACAGTCACTAGCTTATCTTGAACAGATATTTAATTTTGCTAACACTCAGCTCTGCCC | |
| | TCCCCGATCCCCTGGCTCCCCAGCACACATTCCTTTGAAATAAGGTTTCAATATACATCTACATACTATA | |
| | TATATATTTGGCAACTTGTATTTGTGTGTATATATATATATATATGTTTATGTATATATGTGATTCTGAT | |
| | AAAATAGACATTGCTATTCTGTTTTTTATATGTAAAAACAAAACAAGAAAAAATAGAGAATTCTACATAC | |
| | TAAATCTCTCTCCTTTTTTAATTTTAATATTTGTTATCATTTATTTATTGGTGCTACTGTTTATCCGTAA | |
| | TAATTGTGGGGAAAAGATATTAACATCACGTCTTTGTCTCTAGTGCAGTTTTTCGAGATATTCCGTAGTA | |
| | CATATTTATTTTTAAACAACGACAAAGAAATACAGATATATCTTAAAAAAAAAAAAGCATTTTGTATTAA | |
| | AGAATTTAATTCTGATCTCAAAAAAAAAAAAAAAAAA | |
| WIRE | ATGCCAATTCCTCCTCCCCCGCCACCCCCACCTGGTCCTCCTCCACCTCCCACATTTCATCAGGCAAACA | 210 |
| AJ431177.1 | CAGAGCAGCCCAAGCTGAGTAGAGATGAGCAGCGGGGTCGAGGCGCCCTCTTACAGGACATTTGCAAAGG | |
| | GACCAAGCTGAAGAAGGTGACCAACATTAATGATCGGAGTGCTCCCATCCTCGAGAAGCCTAAAGGAAGC | |
| | AGTGGTGGCTATGGCTCTGGAGGAGCTGCCCTGCACCCCAAGGGAGGTCTCTTCCAAGGAGGAGTGCTGA | |
| | AGCTTCGACCTGTGGGAGCCAAGGATGGTTCAGAGAACCTAGCTGGTAAGCCAGCCCTGCAAATCCCCAG | |
| | TTCTCGAGCTGCTGCCCCAAGGCCTCCAGTATCTGCCGCCAGCGGGCGTCCTCAGGATGATACAGACAGC | |
| | AGCCGGGCCTCACTCCCAGAACTGCCCCGGATGCAGAGACCCTCTTTACCGGACCTCTCTCGGCCTAATA | |
| | CCACCAGCAGTACGGGCATGAAGCACAGCTCCTCTGCCCCTCCCCCACCACCCCCAGGGCGGCGTGCCAA | |
| | CGCACCCCCCACACCTCTGCCTATGCACAGCAGCAAAGCCCCCGCCTACAACAGAGAGAAACCCTTGCCA | |
| | CCGACGCCTGGACAAAGGCTTCACCCTGGTCGAGAGGGACCTCCTGCTCCACCCCCAGTCAAACCACCTC | |
| | CTTCCCCTGTGAATATCAGAACAGGACCAAGTGGCCAGTCTCTGGCTCCTCCTCCTCCGCCTTACCGCCA | |
| | GCCTCCTGGGGTCCCCAATGGACCCTCTAGCCCCACTAATGAGTCAGCCCCTGAGCTGCCACAGAGACAC | |
| | AATTCTTTGCATAGGAAGACACCAGGGCCTGTCAGAGGCCTAGCACCTCCTCCACCCACCTCGGCCTCCC | |
| | CATCTTTACTGAGTAATAGGCCACCTCCCCCAGCCCGAGACCCTCCCAGTCGGGGAGCAGCTCCTCCACC | |
| | CCCACCACCTGTGATCCGAAATGGTGCCAGGGATGCTCCCCCTCCCCCACCACCATACCGAATGCATGGG | |
| | TCAGAACCCCCGAGCCGAGGAAAGCCCCCACCTCCACCCTCAAGGACGCCAGCTGGGCCACCCCCTCCTC | |
| | CTCCACCGCCCCTGAGGAATGGCCACAGAGATTCTATCACCACTGTCCGGTCTTTCTTGGATGATTTTGA | |
| | GTCAAAGTATTCCTTCCATCCAGTAGAAGACTTTCCTGCTCCAGAAGAATATAAACACTTTCAGAGGATA | |
| | TATCCCAGCAAAACAAACCGAGCTGCCCGTGGAGCCCCACCTCTGCCACCCATTCTCAGGTGA | |
| YBXI | GATCCACCAGCTGAGAATTCGTCCGCTCCCGAGGCTGAGCAGGGCGGGGCTGAGTAAATGCCGGCTTACCA | 211 |
| BY998904.1 | TCTCTACCATCATCCGGTTTAGTCATCCAACAAGAAAAAATATGAAATTCCAGCAATAAAAAATGAACAAA | |
| | AGATTGGAGCTGAAAACCTAAAGTGCTTGCTTTTTGCCCGTTGACCAAATAAAAAAAACTATCTGCATTAT | |
| | CTATGCAGCTGGGGGTTTTTATTATTTTTACCTAAAGACGTCTCTTTTGGGAAAAAACAAACGTGTTTTTT | |
| | AAAAAAAGCCGGGTTTTCTCCCACACGCCTTTAAAGGTTTTTAAATTGTTTCAAATCGGGCCAAGTTAAAA | |
| | TTTAAAAAACTTCTTTTTAATTTGAAATAAAGTTACAACTTGATTTTTACAAAAAAGTAACAACCTGCAGC | |
| | CCCGGTAATAAGGTCTAAAAATTGTCTTGGTAAA | |
| FGF4 | GGGAGCGGGCGAGTAGGAGGGGGCGCCGGGCTATATATATAGCGGCTCGGCCTCGGGCGGGCCTGGCGCT | 263 |
| NM_002007.2 | CAGGGAGGCGCGCACTGCTCCTCAGAGTCCCAGCTCCAGCCGCGCGCTTTCCGCCCGGCTCGCCGCTCCA | |
| | TGCAGCCGGGGTAGAGCCCGGCGCCCGGGGGCCCCGTCGCTTGCCTCCCGCACCTCCTCGGTTGCGCACT | |
| | CCTGCCCGAGGTCGGCCGTGCGCTCCCGCGGGACGCCACAGGCGCAGCTCTGCCCCCCAGCTTCCCGGGC | |
| | GCACTGACCGCCTGACCGACGCACGGCCCTCGGGCCGGGATGTCGGGGCCCGGGACGGCCGCGGTAGCGC | |
| | TGCTCCCGGCGGTCCTGCTGGCCTTGCTGGCGCCCTGGGCGGGCCGAGGGGGCGCCGCCGCACCCACTGC | |
| | ACCCAACGGCACGCTGGAGGCCGAGCTGGAGCGCCGCTGGGAGAGCCTGGTGGCGCTCTCGTTGGCGCGC | |
| | CTGCCGGTGGCAGCGCAGCCCAAGGAGGCGGCCGTCCAGAGCGGCGCCGGCGACTACCTGCTGGGCATCA | |
| | AGCGGCTGCGGCGGCTCTACTGCAACGTGGGCATCGGCTTCCACCTCCAGGCGCTCCCCGACGGCCGCAT | |
| | CGGCGGCGCGCACGCGGACACCCGCGACAGCCTGCTGGAGCTCTCGCCCGTGGAGCGGGGCGTGGTGAGC | |
| | ATCTTCGGCGTGGCCAGCCGGTTCTTCGTGGCCATGAGCAGCAAGGGCAAGCTCTATGGCTCGCCCTTCT | |
| | TCACCGATGAGTGCACGTTCAAGGAGATTCTCCTTCCCAACAACTACAACGCCTACGAGTCCTACAAGTA | |
| | CCCCGGCATGTTCATCGCCCTGAGCAAGAATGGGAAGACCAAGAAGGGGAACCGAGTGTCGCCCACCATG | |
| | AAGGTCACCCACTTCCTCCCCAGGCTGTGACCCTCCAGAGGACCCTTGCCTCAGCCTCGGGAAGCCCCTG | |
| | GGAGGGCAGTGCCGAGGGTCACCTTGGTGCACTTTCTTCGGATGAAGAGTTTAATGCAAGAGTAGGTGTA | |
| | AGATATTTAAATTAATTATTTAAATGTGTATATATTGCCACCAAATTATTTATAGTTCTGCGGGTGTGTT | |
| | TTTTAATTTTCTGGGGGGAAAAAAAGACAAAACAAAAAACCAACTCTGACTTTTCTGGTGCAACAGTGGA | |
| | GAATCTTACCATTGGATTTCTTTAACTTGT | |

[0025] The subset of the genes is at least 4, at least 5, at least 6, at least 7, at least 8, at least 9, at least 10, at least 11, at least 12, at least 13, at least 14, at least 15, at least 16, at least 17, at least 18, at least 19, at least 20, at least 21, at least 22, at least 23, at least 24, at least 25, at least 26, at least 27, at least 28, at least 29, at least 30, at least 31, at least 32, at least 33, at least 34, at least 35, at least 36, at least 37, at least 38, at least 39, at least 40, at least 41, at least 42, at least 43, at least 44, at least 45, at least 46, at least 47, at least 48, at least 49, at least 50, at least 51, at least 52, at least 53, at least 54, at least 55, at least 56, at least 57, at least 58, at least 59, at least 60, at least 61, at least 62, at least 63, at least 64, at least 65, at least 66, at least 67, at least 68, at least 69, at least 70, at least 71, at least 72, at least 73, at least 74, at least 75, at least 76, at least 77, at least 78, at least 79, at least 80, at least 81, at least 82, at least 83, at least 84, at least 85, at least 86, at least 87, at least 88, at least 89, at least 90, at least 91, at least 92, at least 93, at least 94, at least 95, at least 96, at least 97, at least 98, at least 99, at least 100, at least 101, at least 102, at least 103, at least 104, at least 105, at least 106, at least 107, at least 108, at least 109, at least 110, at least 111, at least 112, at least 113, at least 114, at least 115, at least 116, at least 117, at least 118, at least 119, at least 120, at least 121, at least 122, at least 123, at least 124, at least 125, at least 126, at least 127, at least 128, at least 129, at least 130, at least 131, at least 132, at least 133, at least 134, at least 135, at least 136, at least 137, at least 138, at least 139, at least 140, at least 141, at least 142, at least 143, at least 144, at least 145, at least 146, at least 147, at least 148, at least 150, at least 151, at least 152, at least 153, at least 154, at least 155, at least 156, at least 157, at least 158, at least 159, at least 160, at least 161, at least 162, at least 163, at least 164, at least 165, at least 166, at least 167, at least 168, at least 169, at least 170, at least 171, at least 172, at least 173, at least 174, at least 175, at least 176, at least 177, at least 178, at least 179, at least 180, at least 181, at least 182, at least 183, at least 184, at least 185, at least 186, at least 187, at least 188, at least 189, at least 190, at least 191, at least 192, at least 193, at least 194, at least 195, at least 196, at least 197, at least 198, at least 199, at least 200, at least 201, at least 202, at least 203, at least 204, at least 205, at least 206, at least 207, at least 208, at least 209, at least 210, at least 211, or at least 212 of the genes listed in Table 1A.

[0026] Preferably, the subset of genes detected from Table 1A are the genes listed in Table 1B.

TABLE 1B
Subset of genes from Table 1A, including Genbank Accession numbers and
sequences of the genes.

| GENE | | |
|---|---|---|
| NAME AND | | |
| GENBANK | | SEQ |
| ACCESSION | | ID |
| NUMBER | SEQUENCE | NO: |
| ACTR3B | CAGCGGCGCTGCGGCGGCTCGCGGGAGACGCTGCGCGCGGGGCTAGCGGGCGGCGGAGCGGACGGCGACG | 212 |
| NM_020445 | GGGCGCTCTCGGGCTGCCGGCGGGGCCGAGCGCCGCGCGTCCCGAGCATGGCAGGCTCCCTGCCTCCCTG | |
| | CGTGGTGGACTGTGGCACCGGGTATACCAAGCTTGGCTACGCAGGCAACACTGAGCCCCAGTTCATTATT | |
| | CCTTCATGTATTGCCATCAGAGAGTCAGCAAAGGTAGTTGACCAAGCTCAAAGGAGAGTGTTGAGGGGAG | |
| | TTGATGACCTTGACTTTTTCATAGGAGATGAAGCCATCGATAAACCTACATATGCTACAAAGTGGCCGAT | |
| | ACGACATGGAATCATTGAAGACTGGGATCTTATGGAAAGGTTCATGGAGCAAGTGGTTTTTAAATATCTT | |
| | CGAGCTGAACCTGAGGACCATTATTTTTTAATGACAGAACCTCCACTCAATACACCAGAAAACAGAGAGT | |
| | ATCTTGCAGAAATTATGTTTGAATCATTTAACGTACCAGGACTCTACATTGCAGTTCAGGCAGTGCTGGC | |
| | CTTGGCGGCATCTTGGACATCTCGACAAGTGGGTGAACGTACGTTAACGGGGATAGTCATTGACAGCGGA | |
| | GATGGAGTCACCCATGTTATCCCAGTGGCAGAAGGTTATGTAATTGGAAGCTGCATCAAACACATCCCGA | |
| | TTGCAGGTAGAGATATTACGTATTTCATTCAACAGCTGCTAAGGGAGAGGGAGGTGGGAATCCCTCCTGA | |
| | GCAGTCACTGGAGACCGCAAAAGCCATTAAGGAGAAATACTGTTACATTTGCCCCGATATAGTCAAGGAA | |
| | TTTGCCAAGTATGATGTGGATCCCCGGAAGTGGATCAAACAGTACACGGGTATCAATGCGATCAACCAGA | |
| | AGAAGTTTGTTATAGACGTTGGTTACGAAAGATTCCTGGGACCTGAAATATTCTTTCACCCGGAGTTTGC | |
| | CAACCCAGACTTTATGGAGTCCATCTCAGATGTTGTTGATGAAGTAATACAGAACTGCCCCATCGATGTG | |
| | CGGCGCCCGCTGTATAAGAATGTCGTACTCTCAGGAGGCTCCACCATGTTCAGGGATTTCGGACGCCGAC | |
| | TGCAGAGGGATTTGAAGAGAGTGGTGGATGCTAGGCTGAGGCTCAGCGAGGAGCTCAGCGGCGGGAGGAT | |
| | CAAGCCGAAGCCTGTGGAGGTCCAGGTGGTCACGCATCACATGCAGCGCTACGCCGTGTGGTTCGGAGGC | |
| | TCCATGCTGGCCTCGACTCCCGAGTTCTTTCAGGTCTGCCACACCAAGAAGGACTATGAAGAGTACGGGC | |
| | CCAGCATCTGCCGCCACAACCCCGTCTTTGGAGTCATGTCCTAGTGTCTGCCTGAACGCGTCGTTCGATG | |
| | GTGTCACGTTGGGGAACAAGTGTCCTTCAGAACCCAGAGAAGGCCGCCGTTCTGTAAATAGCGACGTCGG | |
| | TGTTGCTGCCCAGCAGCGTGCTTGCATTGCCGGTGCATGAGGCGCGGCGCGGGCCCTTCAGTAAAAGCCA | |
| | TTTATCCGTGTGCCGACCGCTGTCTGCCAGCCTCCTCCTTCTCCCGCCCTCCTCACCCTCGCTCTCCCTC | |
| | CTCCTCCTCCTCCGAGCTGCTAGCTGACAAATACAATTCTGAAGGAATCCAAATGTGACTTTGAAAATTG | |
| | TTAGAGAAAACAACATTAGAAAATGGCGCAAAATCGTTAGGTCCCAGGAGAGAATGTGGGGGCGCAAACC | |
| | CTTTTCCTCCCAGCCTATTTTTGTAAATAAAATGTTTAAACTTGAAATACAAATCGATGTTTATATTTCC | |
| | TATCATTTTGTATTTTATGGTATTTGGTACAACTGGCTGATACTAAGCACGAATAGATATTGATGTTATG | |
| | GAGTGCTGTAATCCAAAGTTTTTAATTGTGAGGCATGTTCTGATATGTTTATAGGCAAACAAATAAAACA | |
| | GCAAACTTTTTTGCCACATGTTTGCTAGAAAATGATTATACTTTATTGGAGTGACATGAAGTTTGAACAC | |
| | TAAACAGTAATGTATGAGAATTACTACAGATACATGTATCTTTTAGTTTTTTTTGTTTGAACTTTCTGGA | |
| | GCTGTTTTATAGAAGATGATGGTTTGTTGTCGGTGAGTGTTGGATGAAATACTTCCTTGCACCATTGTAA | |
| | TAAAAGCTGTTAGAATATTTGTAAATATC | |
| ACTR3B | CAGCGGCGCTGCGGCGGCTCGCGGGAGACGCTGCGCGCGGGGCTAGCGGGCGGCGGAGCGGACGGCGACG | 213 |
| NM_001040135 | GGGCGCTCTCGGGCTGCCGGCGGGGCCGAGCGCCGCGCGTCCCGAGCATGGCAGGCTCCCTGCCTCCCTG | |
| | CGTGGTGGACTGTGGCACCGGGTATACCAAGCTTGGCTACGCAGGCAACACTGAGCCCCAGTTCATTATT | |
| | CCTTCATGTATTGCCATCAGAGAGTCAGCAAAGGTAGTTGACCAAGCTCAAAGGAGAGTGTTGAGGGGAG | |
| | TTGATGACCTTGACTTTTTCATAGGAGATGAAGCCATCGATAAACCTACATATGCTACAAAGTGGCCGAT | |
| | ACGACATGGAATCATTGAAGACTGGGATCTTATGGAAAGGTTCATGGAGCAAGTGGTTTTTAAATATCTT | |
| | CGAGCTGAACCTGAGGACCATTATTTTTTAATGACAGAACCTCCACTCAATACACCAGAAAACAGAGAGT | |
| | ATCTTGCAGAAATTATGTTTGAATCATTTAACGTACCAGGACTCTACATTGCAGTTCAGGCAGTGCTGGC | |
| | CTTGGCGGCATCTTGGACATCTCGACAAGTGGGTGAACGTACGTTAACGGGGATAGTCATTGACAGCGGA | |
| | GATGGAGTCACCCATGTTATCCCAGTGGCAGAAGGTTATGTAATTGGAAGCTGCATCAAACACATCCCGA | |
| | TTGCAGGTAGAGATATTACGTATTTCATTCAACAGCTGCTAAGGGAGAGGGAGGTGGGAATCCCTCCTGA | |
| | GCAGTCACTGGAGACCGCAAAAGCCATTAAGGAGAAATACTGTTACATTTGCCCCGATATAGTCAAGGAA | |
| | TTTGCCAAGTATGATGTGGATCCCCGGAAGTGGATCAAACAGTACACGGGTATCAATGCGATCAACCAGA | |
| | AGAAGTTTGTTATAGACGTTGGTTACGAAAGATTCCTGGGACCTGAAATATTCTTTCACCCGGAGTTTGC | |
| | CAACCCAGACTTTATGGAGTCCATCTCAGATGTTGTTGATGAAGTAATACAGAACTGCCCCATCGATGTG | |
| | CGGCGCCCGCTGTATAAGCCCGAGTTCTTTCAGGTCTGCCACACCAAGAAGGACTATGAAGAGTACGGGC | |
| | CCAGCATCTGCCGCCACAACCCCGTCTTTGGAGTCATGTCCTAGTGTCTGCCTGAACGCGTCGTTCGATG | |
| | GTGTCACGTTGGGGAACAAGTGTCCTTCAGAACCCAGAGAAGGCCGCCGTTCTGTAAATAGCGACGTCGG | |
| | TGTTGCTGCCCAGCAGCGTGCTTGCATTGCCGGTGCATGAGGCGCGGCGCGGGCCCTTCAGTAAAAGCCA | |
| | TTTATCCGTGTGCCGACCGCTGTCTGCCAGCCTCCTCCTTCTCCCGCCCTCCTCACCCTCGCTCTCCCTC | |
| | CTCCTCCTCCTCCGAGCTGCTAGCTGACAAATACAATTCTGAAGGAATCCAAATGTGACTTTGAAAATTG | |
| | TTAGAGAAAACAACATTAGAAAATGGCGCAAAATCGTTAGGTCCCAGGAGAGAATGTGGGGGCGCAAACC | |
| | CTTTTCCTCCCAGCCTATTTTTGTAAATAAAATGTTTAAACTTGAAATACAAATCGATGTTTATATTTCC | |
| | TATCATTTTGTATTTTATGGTATTTGGTACAACTGGCTGATACTAAGCACGAATAGATATTGATGTTATG | |
| | GAGTGCTGTAATCCAAAGTTTTTAATTGTGAGGCATGTTCTGATATGTTTATAGGCAAACAAATAAAACA | |
| | GCAAACTTTTTTGCCACATGTTTGCTAGAAAATGATTATACTTTATTGGAGTGACATGAAGTTTGAACAC | |
| | TAAACAGTAATGTATGAGAATTACTACAGATACATGTATCTTTTAGTTTTTTTTGTTTGAACTTTCTGGA | |
| | GCTGTTTTATAGAAGATGATGGTTTGTTGTCGGTGAGTGTTGGATGAAATACTTCCTTGCACCATTGTAA | |
| | TAAAAGCTGTTAGAATATTTGTAAATATC | |
| ANLN | CTCGGCGCTGAAATTCAAATTTGAACGGCTGCAGAGGCCGAGTCCGTCACTGGAAGCCGAGAGGAGAGGA | 214 |
| NM_018685 | CAGCTGGTTGTGGGAGAGTTCCCCCGCCTCAGACTCCTGGTTTTTTCCAGGAGACACACTGAGCTGAGAC | |
| | TCACTTTTCTCTTCCTGAATTTGAACCACCGTTTCCATCGTCTCGTAGTCCGACGCCTGGGGCGATGGAT | |
| | CCGTTTACGGAGAAACTGCTGGAGCGAACCCGTGCCAGGCGAGAGAATCTTCAGAGAAAAATGGCTGAGA | |
| | GGCCCACAGCAGCTCCAAGGTCTATGACTCATGCTAAGCGAGCTAGACAGCCACTTTCAGAAGCAAGTAA | |
| | CCAGCAGCCCCTCTCTGGTGGTGAAGAGAAATCTTGTACAAAACCATCGCCATCAAAAAAACGCTGTTCT | |
| | GACAACACTGAAGTAGAAGTTTCTAACTTGGAAAATAAACAACCAGTTGAGTCGACATCTGCAAAATCTT | |
| | GTTCTCCAAGTCCTGTGTCTCCTCAGGTGCAGCCACAAGCAGCAGATACCATCAGTGATTCTGTTGCTGT | |
| | CCCGGCATCACTGCTGGGCATGAGGAGAGGGCTGAACTCAAGATTGGAAGCAACTGCAGCCTCCTCAGTT | |
| | AAAACACGTATGCAAAAACTTGCAGAGCAACGGCGCCGTTGGGATAATGATGATATGACAGATGACATTC | |
| | CTGAAAGCTCACTCTTCTCACCAATGCCATCAGAGGAAAAGGCTGCTTCCCCTCCCAGACCTCTGCTTTC | |
| | AAATGCCTCGGCAACTCCAGTTGGCAGAAGGGGCCGTCTGGCCAATCTTGCTGCAACTATTTGCTCCTGG | |
| | GAAGATGATGTAAATCACTCATTTGCAAAACAAAACAGTGTACAAGAACAGCCTGGTACCGCTTGTTTAT | |
| | CCAAATTTTCCTCTGCAAGTGGAGCATCTGCTAGGATCAATAGCAGCAGTGTTAAGCAGGAAGCTACATT | |
| | CTGTTCCCAAAGGGATGGCGATGCCTCTTTGAATAAAGCCCTATCCTCAAGTGCTGATGATGCGTCTTTG | |
| | GTTAATGCCTCAATTTCCAGCTCTGTGAAAGCTACTTCTCCAGTGAAATCTACTACATCTATCACTGATG | |
| | CTAAAAGTTGTGAGGGACAAAATCCTGAGCTACTTCCAAAAACTCCTATTAGTCCTCTGAAAACGGGGGT | |
| | ATCGAAACCAATTGTGAAGTCAACTTTATCCCAGACAGTTCCATCCAAGGGAGAATTAAGTAGAGAAATT | |
| | TGTCTGCAATCTCAATCTAAAGACAAATCTACGACACCAGGAGGAACAGGAATTAAGCCTTTCCTGGAAC | |
| | GCTTTGGAGAGCGTTGTCAAGAACATAGCAAAGAAAGTCCAGCTCGTAGCACACCCCACAGAACCCCCAT | |
| | TATTACTCCAAATACAAAGGCCATCCAAGAAAGATTATTCAAGCAAGACACATCTTCATCTACTACCCAT | |
| | TTAGCACAACAGCTCAAGCAGGAACGTCAAAAAGAACTAGCATGTCTTCGTGGCCGATTTGACAAGGGCA | |
| | ATATATGGAGTGCAGAAAAAGGCGGAAACTCAAAAAGCAAACAACTAGAAACCAAACAGGAAACTCACTG | |
| | TCAGAGCACTCCCCTCAAAAAACACCAAGGTGTTTCAAAAACTCAGTCACTTCCAGTAACAGAAAAGGTG | |
| | ACCGAAAACCAGATACCAGCCAAAAATTCTAGTACAGAACCTAAAGGTTTCACTGAATGCGAAATGACGA | |
| | AATCTAGCCCTTTGAAAATAACATTGTTTTTAGAAGAGGACAAATCCTTAAAAGTAACATCAGACCCAAA | |
| | GGTTGAGCAGAAAATTGAAGTGATACGTGAAATTGAGATGAGTGTGGATGATGATGATATCAATAGTTCG | |
| | AAAGTAATTAATGACCTCTTCAGTGATGTCCTAGAGGAAGGTGAACTAGATATGGAGAAGAGCCAAGAGG | |
| | AGATGGATCAAGCATTAGCAGAAAGCAGCGAAGAACAGGAAGATGCACTGAATATCTCCTCAATGTCTTT | |
| | ACTTGCACCATTGGCACAAACAGTTGGTGTGGTAAGTCCAGAGAGTTTAGTGTCCACACCTAGACTGGAA | |
| | TTGAAAGACACCAGCAGAAGTGATGAAAGTCCAAAACCAGGAAAATTCCAAAGAACTCGTGTCCCTCGAG | |
| | CTGAATCTGGTGATAGCCTTGGTTCTGAAGATCGTGATCTTCTTTACAGCATTGATGCATATAGATCTCA | |
| | AAGATTCAAAGAAACAGAACGTCCATCAATAAAGCAGGTGATTGTTCGGAAGGAAGATGTTACTTCAAAA | |
| | CTGGATGAAAAAAATAATGCCTTTCCTTGTCAAGTTAATATCAAACAGAAAATGCAGGAACTCAATAACG | |
| | AAATAAATATGCAACAGACAGTGATCTATCAAGCTAGCCAGGCTCTTAACTGCTGTGTTGATGAAGAACA | |
| | TGGAAAAGGGTCCCTAGAAGAAGCTGAAGCAGAAAGACTTCTTCTAATTGCAACTGGGAAGAGAACACTT | |
| | TTGATTGATGAATTGAATAAATTGAAGAACGAAGGACCTCAGAGGAAGAATAAGGCTAGTCCCCAAAGTG | |
| | AATTTATGCCATCCAAAGGATCAGTTACTTTGTCAGAAATCCGCTTGCCTCTAAAAGCAGATTTTGTCTG | |
| | CAGTACGGTTCAGAAACCAGATGCAGCAAATTACTATTACTTAATTATACTAAAAGCAGGAGCTGAAAAT | |
| | ATGGTAGCCACACCATTAGCAAGTACTTCAAACTCTCTTAACGGTGATGCTCTGACATTCACTACTACAT | |
| | TTACTCTGCAAGATGTATCCAATGACTTTGAAATAAATATTGAAGTTTACAGCTTGGTGCAAAAGAAAGA | |
| | TCCCTCAGGCCTTGATAAGAAGAAAAAAACATCCAAGTCCAAGGCTATTACTCCAAAGCGACTCCTCACA | |
| | TCTATAACCACAAAAAGCAACATTCATTCTTCAGTCATGGCCAGTCCAGGAGGTCTTAGTGCTGTGCGAA | |
| | CCAGCAACTTCGCCCTTGTTGGATCTTACACATTATCATTGTCTTCAGTAGGAAATACTAAGTTTGTTCT | |
| | GGACAAGGTCCCCTTTTTATCTTCTTTGGAAGGTCATATTTATTTAAAAATAAAATGTCAAGTGAATTCC | |
| | AGTGTTGAAGAAAGAGGTTTTCTAACCATATTTGAAGATGTTAGTGGTTTTGGTGCCTGGCATCGAAGAT | |
| | GGTGTGTTCTTTCTGGAAACTGTATATCTTATTGGACTTATCCAGATGATGAGAAACGCAAGAATCCCAT | |
| | AGGAAGGATAAATCTGGCTAATTGTACCAGTCGTCAGATAGAACCAGCCAACAGAGAATTTTGTGCAAGA | |
| | CGCAACACTTTTGAATTAATTACTGTCCGACCACAAAGAGAAGATGACCGAGAGACTCTTGTCAGCCAAT | |
| | GCAGGGACACACTCTGTGTTACCAAGAACTGGCTGTCTGCAGATACTAAAGAAGAGCGGGATCTCTGGAT | |
| | GCAAAAACTCAATCAAGTTCTTGTTGATATTCGCCTCTGGCAACCTGATGCTTGCTACAAACCTATTGGA | |
| | AAGCCTTAAACCGGGAAATTTCCATGCTATCTAGAGGTTTTTGATGTCATCTTAAGAAACACACTTAAGA | |
| | GCATCAGATTTACTGATTGCATTTTATGCTTTAAGTACGAAAGGGTTTGTGCCAATATTCACTACGTATT | |
| | ATGCAGTATTTATATCTTTTGTATGTAAAACTTTAACTGATTTCTGTCATTCATCAATGAGTAGAAGTAA | |
| | ATACATTATAGTTGATTTTGCTAAATCTTAATTTAAAAGCCTCATTTTCCTAGAAATCTAATTATTCAGT | |
| | TATTCATGACAATATTTTTTTAAAAGTAAGAAATTCTGAGTTGTCTTCTTGGAGCTGTAGGTCTTGAAGC | |
| | AGCAACGTCTTTCAGGGGTTGGAGACAGAAACCCATTCTCCAATCTCAGTAGTTTTTTCGAAAGGCTGTG | |
| | ATCATTTATTGATCGTGATATGACTTGTTACTAGGGTACTGAAAAAAATGTCTAAGGCCTTTACAGAAAC | |
| | ATTTTTAGTAATGAGGATGAGAACTTTTTCAAATAGCAAATATATATTGGCTTAAAGCATGAGGCTGTCT | |
| | TCAGAAAAGTGATGTGGACATAGGAGGCAATGTGTGAGACTTGGGGGTTCAATATTTTATATAGAAGAGT | |
| | TAATAAGCACATGGTTTACATTTACTCAGCTACTATATATGCAGTGTGGTGCACATTTTCACAGAATTCT | |
| | GGCTTCATTAAGATCATTATTTTTGCTGCGTAGCTTACAGACTTAGCATATTAGTTTTTTCTACTCCTAC | |
| | AAGTGTAAATTGAAAAATCTTTATATTAAAAAAGTAAACTGTTATGAAGCTGCTATGTACTAATAATACT | |
| | TTGCTTGCCAAAGTGTTTGGGTTTTGTTGTTGTTTGTTTGTTTGTTTGTTTTTGGTTCATGAACAACAGT | |
| | GTCTAGAAACCCATTTTGAAAGTGGAAAATTATTAAGTCACCTATCACCTTTAAACGCCTTTTTTTAAAA | |
| | TTATAAAATATTGTAAAGCAGGGTCTCAACTTTTAAATACACTTTGAACTTCTTCTCTGAATTATTAAAG | |
| | TTCTTTATGACCTCATTTATAAACACTAAATTCTGTCACCTCCTGTCATTTTATTTTTTATTCATTCAAA | |
| | TGTATTTTTTCTTGTGCATATTATAAAAATATATTTTATGAGCTCTTACTCAAATAAATACCTGTAAATG | |
| | TCTAAAGGAAAAAAAAAAAAAAAAAA | |
| BAG1 | AGGCCGGGGCGGGGCTGGGAAGTAGTCGGGCGGGGTTGTGAGACGCCGCGCTCAGCTTCCATCGCTGGGC | 215 |
| NM_004323 | GGTCAACAAGTGCGGGCCTGGCTCAGCGCGGGGGGGCGCGGAGACCGCGAGGCGACCGGGAGCGGCTGGG | |
| | TTCCCGGCTGCGCGCCCTTCGGCCAGGCCGGGAGCCGCGCCAGTCGGAGCCCCCGGCCCAGCGTGGTCCG | |
| | CCTCCCTCTCGGCGTCCACCTGCCCGGAGTACTGCCAGCGGGCATGACCGACCCACCAGGGGCGCCGCCG | |
| | CCGGCGCTCGCAGGCCGCGGATGAAGAAGAAAACCCGGCGCCGCTCGACCCGGAGCGAGGAGTTGACCCG | |
| | GAGCGAGGAGTTGACCCTGAGTGAGGAAGCGACCTGGAGTGAAGAGGCGACCCAGAGTGAGGAGGCGACC | |
| | CAGGGCGAAGAGATGAATCGGAGCCAGGAGGTGACCCGGGACGAGGAGTCGACCCGGAGCGAGGAGGTGA | |
| | CCAGGGAGGAAATGGCGGCAGCTGGGCTCACCGTGACTGTCACCCACAGCAATGAGAAGCACGACCTTCA | |
| | TGTTACCTCCCAGCAGGGCAGCAGTGAACCAGTTGTCCAAGACCTGGCCCAGGTTGTTGAAGAGGTCATA | |
| | GGGGTTCCACAGTCTTTTCAGAAACTCATATTTAAGGGAAAATCTCTGAAGGAAATGGAAACACCGTTGT | |
| | CAGCACTTGGAATACAAGATGGTTGCCGGGTCATGTTAATTGGGAAAAAGAACAGTCCACAGGAAGAGGT | |
| | TGAACTAAAGAAGTTGAAACATTTGGAGAAGTCTGTGGAGAAGATAGCTGACCAGCTGGAAGAGTTGAAT | |
| | AAAGAGCTTACTGGAATCCAGCAGGGTTTTCTGCCCAAGGATTTGCAAGCTGAAGCTCTCTGCAAACTTG | |
| | ATAGGAGAGTAAAAGCCACAATAGAGCAGTTTATGAAGATCTTGGAGGAGATTGACACACTGATCCTGCC | |
| | AGAAAATTTCAAAGACAGTAGATTGAAAAGGAAAGGCTTGGTAAAAAAGGTTCAGGCATTCCTAGCCGAG | |
| | TGTGACACAGTGGAGCAGAACATCTGCCAGGAGACTGAGCGGCTGCAGTCTACAAACTTTGCCCTGGCCG | |
| | AGTGAGGTGTAGCAGAAAAAGGCTGTGCTGCCCTGAAGAATGGCGCCACCAGCTCTGCCGTCTCTGGAGC | |
| | GGAATTTACCTGATTTCTTCAGGGCTGCTGGGGGCAACTGGCCATTTGCCAATTTTCCTACTCTCACACT | |
| | GGTTCTCAATGAAAAATAGTGTCTTTGTGATTTTGAGTAAAGCTCCTATCTGTTTTCTCCTTCTGTCTCT | |
| | GTGGTTGTACTGTCCAGCAATCCACCTTTTCTGGAGAGGGCCACCTCTGCCCAAATTTTCCCAGCTGTTT | |
| | GGACCTCTGGGTGCTTTCTTTGGGCTGGTGAGAGCTCTAATTTGCCTTGGGCCAGTTTCAGGTTTATAGG | |
| | CCCCCTCAGTCTTCAGATACATGAGGGCTTCTTTGCTCTTGTGATCGTGTAGTCCCATAGCTGTAAAACC | |
| | AGAATCACCAGGAGGTTGCACCTAGTCAGGAATATTGGGAATGGCCTAGAACAAGGTGTTTGGCACATAA | |
| | GTAGACCACTTATCCCTCATTGTGACCTAATTCCAGAGCATCTGGCTGGGTTGTTGGGTTCTAGACTTTG | |
| | TCCTCACCTCCCAGTGACCCTGACTAGCCACAGGCCATGAGATACCAGGGGGCCGTTCCTTGGATGGAGC | |
| | CTGTGGTTGATGCAAGGCTTCCTTGTCCCCAAGCAAGTCTTCAGAAGGTTAGAACCCAGTGTTGACTGAG | |
| | TCTGTGCTTGAAACCAGGCCAGAGCCATGGATTAGGAAGGGCAAAGAGAAGGCACCAGAATGAGTAAAGC | |
| | AGGCAGGTGGTGAAGCCAACCATAAACTTCTCAGGAGTGACATGTGCTTCCTTCAAAGGCATTTTTGTTA | |
| | ACCATATCCTTCTGAGTTCTATGTTTCCTTCACAGCTGTTCTATCCATTTTGTGGACTGTCCCCCACCCC | |
| | CACCCCATCATTGTTTTTAAAAAATTAAGGCCTGGCGCAGCAGCTCATGCCTATAATCCCAGCACTTTGG | |
| | GAGGCTGAGGCGGGCGGATCACTTGAGGCCAGGAGTTTGAGACCAGCCCAGGCAACATAGCAAAACCCCA | |
| | TTCTGCTTTAAAAAAAAAAAAAAAAAAAATTAGCTTGGCGTAGTGGCATGTGCCTATAATCCCAGCTACT | |
| | GGGGAGGCTGAGGCACAAGAATCATTTGAACCTGGGAGGTAGAGGTTGCTGTGAGCCGAGATTACGCCCC | |
| | TGCACTCCAGCCTGGGTCACAGAGTGAGACTCCATCTCAGAAAAAAAAAAAATTGAGTCAGGTGCAGTAG | |
| | CTCCTTCCTGTAGTCCCAGCTACTTGGGAGGCTGAGGCTAGAGGATCACTTGAGCCCAGGAGTTTGAGTC | |
| | TAGTCTGGGCAACATAGCAAGACCCCATCTCTAAAATTTAAGTAAGTAAAAGTAGATAAATAAAAAGAAA | |
| | AAAAAACTGTTTATGTGCTCATCATAAAGTAGAAGAGTGGTTTGCTTTTTTTTTTTTTTTTGGATTAATG | |
| | AGGAAATCATTCTGTGGCTCTAGTCATAATTTATGCTTAATAACATTGATAGTAGCCCTTTGCGCTATAA | |
| | CTCTACCTAAAGACTCACATCATTTGGCAGAGAGAGAGTCGTTGAAGTCCCAGGAATTCAGGACTGGGCA | |
| | GGTTAAGACCTCAGACAAGGTAGTAGAGGTAGACTTGTGGACAAGGCTCGGGTCCCAGCCCACCGCACCC | |
| | CAACTTTAATCAGAGTGGTTCACTATTGATCTATTTTTGTGTGATAGCTGTGTGGCGTGGGCCACAACAT | |
| | TTAATGAGAAGTTACTGTGCACCAAACTGCCGAACACCATTCTAAACTATTCATATATATTAGTCATTTA | |
| | ATTCTTACATAACTTGAGAGGTAGACAGATATCCTTATTTTAGAGATGAGGAAACCAAGAGAACTTAGGT | |
| | CATTAGCGCAAGGTTGTAGAGTAAGCGGCAAAGCCAAGACACAAAGCTGGGTGGTTTGGTTTCAGAGCCA | |
| | GTGCTTTTCCCCTCTACTGTACTGCCTCTCAACCAACACAGGGTTGCACAGGCCCATTCTCTGATTTTTT | |
| | TCCTCTTGTCCTCTGCCTCTCCCTCTAGCTCCCACTTCCTCTCTGCTCTAGTTCATTTTCTTTAGAGCAG | |
| | CCCGAGTGATCATGAAGTGCAAATCTTGCCATGTCAGTCCCCTGCTTAGAACCCTCCAATGGCTCACTTT | |
| | CTCTTTAGGCAAAAGTCTTTACCCCATGCCTTCTCCCATCTCATCTCAACCCCCTCATTTGTTGGCTGTC | |
| | TGCTGTCAGCCACTCTTCTTTCAGGTCCTCAGATGCACTGCACCCTCTCCTGCCTGGGGGTCTTTGCTCC | |
| | TGCTACTACCTCTGCTTGAACAGCTCCTCACCTTCCTTCCTCCAACCCTACCCTTGTATAGGTGACTTTT | |
| | GTTCATCCTTCAGAATTCAACTCACATGTCTCTTGCATGGAGAACCCTCACCTACTGTGTTGAGACCCTG | |
| | TCCAGCCCCCAGGTGGGATCCTCTCTCGACTTCCCATACATTTCTTTCACAGCATTTACATAGTCCATGA | |
| | TAGTTTACTTGTGGGATTATTTGGTTAATCTTTGCCTTTAACACCAGGGTTCCTTGGGTGAAGGAGCTTC | |
| | TTTATCTTGGTAACAGCATTATTTCAAGCATAACTTGTAATATAGTTATATTACATATATAACATATATA | |
| | TATATAACATAACATATATAACATATATAACAAGCATAACTTGTTATATAGTCTTGTATATAGTAAGACC | |
| | TCAATAAATATTTGGAGAACAAAAAAAAAAAAAAA | |
| BCL2 | TTTCTGTGAAGCAGAAGTCTGGGAATCGATCTGGAAATCCTCCTAATTTTTACTCCCTCTCCCCGCGACT | 216 |
| NM_000633 | CCTGATTCATTGGGAAGTTTCAAATCAGCTATAACTGGAGAGTGCTGAAGATTGATGGGATCGTTGCCTT | |
| | ATGCATTTGTTTTGGTTTTACAAAAAGGAAACTTGACAGAGGATCATGCTGTACTTAAAAAATACAACAT | |
| | CACAGAGGAAGTAGACTGATATTAACAATACTTACTAATAATAACGTGCCTCATGAAATAAAGATCCGAA | |
| | AGGAATTGGAATAAAAATTTCCTGCATCTCATGCCAAGGGGGAAACACCAGAATCAAGTGTTCCGCGTGA | |
| | TTGAAGACACCCCCTCGTCCAAGAATGCAAAGCACATCCAATAAAATAGCTGGATTATAACTCCTCTTCT | |
| | TTCTCTGGGGGCCGTGGGGTGGGAGCTGGGGCGAGAGGTGCCGTTGGCCCCCGTTGCTTTTCCTCTGGGA | |
| | AGGATGGCGCACGCTGGGAGAACAGGGTACGATAACCGGGAGATAGTGATGAAGTACATCCATTATAAGC | |
| | TGTCGCAGAGGGGCTACGAGTGGGATGCGGGAGATGTGGGCGCCGCGCCCCCGGGGGCCGCCCCCGCACC | |
| | GGGCATCTTCTCCTCCCAGCCCGGGCACACGCCCCATCCAGCCGCATCCCGGGACCCGGTCGCCAGGACC | |
| | TCGCCGCTGCAGACCCCGGCTGCCCCCGGCGCCGCCGCGGGGCCTGCGCTCAGCCCGGTGCCACCTGTGG | |
| | TCCACCTGACCCTCCGCCAGGCCGGCGACGACTTCTCCCGCCGCTACCGCCGCGACTTCGCCGAGATGTC | |
| | CAGCCAGCTGCACCTGACGCCCTTCACCGCGCGGGGACGCTTTGCCACGGTGGTGGAGGAGCTCTTCAGG | |
| | GACGGGGTGAACTGGGGGAGGATTGTGGCCTTCTTTGAGTTCGGTGGGGTCATGTGTGTGGAGAGCGTCA | |
| | ACCGGGAGATGTCGCCCCTGGTGGACAACATCGCCCTGTGGATGACTGAGTACCTGAACCGGCACCTGCA | |
| | CACCTGGATCCAGGATAACGGAGGCTGGGATGCCTTTGTGGAACTGTACGGCCCCAGCATGCGGCCTCTG | |
| | TTTGATTTCTCCTGGCTGTCTCTGAAGACTCTGCTCAGTTTGGCCCTGGTGGGAGCTTGCATCACCCTGG | |
| | GTGCCTATCTGGGCCACAAGTGAAGTCAACATGCCTGCCCCAAACAAATATGCAAAAGGTTCACTAAAGC | |
| | AGTAGAAATAATATGCATTGTCAGTGATGTACCATGAAACAAAGCTGCAGGCTGTTTAAGAAAAAATAAC | |
| | ACACATATAAACATCACACACACAGACAGACACACACACACACAACAATTAACAGTCTTCAGGCAAAACG | |
| | TCGAATCAGCTATTTACTGCCAAAGGGAAATATCATTTATTTTTTACATTATTAAGAAAAAAAGATTTAT | |
| | TTATTTAAGACAGTCCCATCAAAACTCCTGTCTTTGGAAATCCGACCACTAATTGCCAAGCACCGCTTCG | |
| | TGTGGCTCCACCTGGATGTTCTGTGCCTGTAAACATAGATTCGCTTTCCATGTTGTTGGCCGGATCACCA | |
| | TCTGAAGAGCAGACGGATGGAAAAAGGACCTGATCATTGGGGAAGCTGGCTTTCTGGCTGCTGGAGGCTG | |
| | GGGAGAAGGTGTTCATTCACTTGCATTTCTTTGCCCTGGGGGCTGTGATATTAACAGAGGGAGGGTTCCT | |
| | GTGGGGGGAAGTCCATGCCTCCCTGGCCTGAAGAAGAGACTCTTTGCATATGACTCACATGATGCATACC | |
| | TGGTGGGAGGAAAAGAGTTGGGAACTTCAGATGGACCTAGTACCCACTGAGATTTCCACGCCGAAGGACA | |
| | GCGATGGGAAAAATGCCCTTAAATCATAGGAAAGTATTTTTTTAAGCTACCAATTGTGCCGAGAAAAGCA | |
| | TTTTAGCAATTTATACAATATCATCCAGTACCTTAAGCCCTGATTGTGTATATTCATATATTTTGGATAC | |
| | GCACCCCCCAACTCCCAATACTGGCTCTGTCTGAGTAAGAAACAGAATCCTCTGGAACTTGAGGAAGTGA | |
| | ACATTTCGGTGACTTCCGCATCAGGAAGGCTAGAGTTACCCAGAGCATCAGGCCGCCACAAGTGCCTGCT | |
| | TTTAGGAGACCGAAGTCCGCAGAACCTGCCTGTGTCCCAGCTTGGAGGCCTGGTCCTGGAACTGAGCCGG | |
| | GGCCCTCACTGGCCTCCTCCAGGGATGATCAACAGGGCAGTGTGGTCTCCGAATGTCTGGAAGCTGATGG | |
| | AGCTCAGAATTCCACTGTCAAGAAAGAGCAGTAGAGGGGTGTGGCTGGGCCTGTCACCCTGGGGCCCTCC | |
| | AGGTAGGCCCGTTTTCACGTGGAGCATGGGAGCCACGACCCTTCTTAAGACATGTATCACTGTAGAGGGA | |
| | AGGAACAGAGGCCCTGGGCCCTTCCTATCAGAAGGACATGGTGAAGGCTGGGAACGTGAGGAGAGGCAAT | |
| | GGCCACGGCCCATTTTGGCTGTAGCACATGGCACGTTGGCTGTGTGGCCTTGGCCCACCTGTGAGTTTAA | |
| | AGCAAGGCTTTAAATGACTTTGGAGAGGGTCACAAATCCTAAAAGAAGCATTGAAGTGAGGTGTCATGGA | |
| | TTAATTGACCCCTGTCTATGGAATTACATGTAAAACATTATCTTGTCACTGTAGTTTGGTTTTATTTGAA | |
| | AACCTGACAAAAAAAAAGTTCCAGGTGTGGAATATGGGGGTTATCTGTACATCCTGGGGCATTAAAAAAA | |
| | AAATCAATGGTGGGGAACTATAAAGAAGTAACAAAAGAAGTGACATCTTCAGCAAATAAACTAGGAAATT | |
| | TTTTTTTCTTCCAGTTTAGAATCAGCCTTGAAACATTGATGGAATAACTCTGTGGCATTATTGCATTATA | |
| | TACCATTTATCTGTATTAACTTTGGAATGTACTCTGTTCAATGTTTAATGCTGTGGTTGATATTTCGAAA | |
| | GCTGCTTTAAAAAAATACATGCATCTCAGCGTTTTTTTGTTTTTAATTGTATTTAGTTATGGCCTATACA | |
| | CTATTTGTGAGCAAAGGTGATCGTTTTCTGTTTGAGATTTTTATCTCTTGATTCTTCAAAAGCATTCTGA | |
| | GAAGGTGAGATAAGCCCTGAGTCTCAGCTACCTAAGAAAAACCTGGATGTCACTGGCCACTGAGGAGCTT | |
| | TGTTTCAACCAAGTCATGTGCATTTCCACGTCAACAGAATTGTTTATTGTGACAGTTATATCTGTTGTCC | |
| | CTTTGACCTTGTTTCTTGAAGGTTTCCTCGTCCCTGGGCAATTCCGCATTTAATTCATGGTATTCAGGAT | |
| | TACATGCATGTTTGGTTAAACCCATGAGATTCATTCAGTTAAAAATCCAGATGGCAAATGACCAGCAGAT | |
| | TCAAATCTATGGTGGTTTGACCTTTAGAGAGTTGCTTTACGTGGCCTGTTTCAACACAGACCCACCCAGA | |
| | GCCCTCCTGCCCTCCTTCCGCGGGGGCTTTCTCATGGCTGTCCTTCAGGGTCTTCCTGAAATGCAGTGGT | |
| | GCTTACGCTCCACCAAGAAAGCAGGAAACCTGTGGTATGAAGCCAGACCTCCCCGGCGGGCCTCAGGGAA | |
| | CAGAATGATCAGACCTTTGAATGATTCTAATTTTTAAGCAAAATATTATTTTATGAAAGGTTTACATTGT | |
| | CAAAGTGATGAATATGGAATATCCAATCCTGTGCTGCTATCCTGCCAAAATCATTTTAATGGAGTCAGTT | |
| | TGCAGTATGCTCCACGTGGTAAGATCCTCCAAGCTGCTTTAGAAGTAACAATGAAGAACGTGGACGTTTT | |
| | TAATATAAAGCCTGTTTTGTCTTTTGTTGTTGTTCAAACGGGATTCACAGAGTATTTGAAAAATGTATAT | |
| | ATATTAAGAGGTCACGGGGGCTAATTGCTGGCTGGCTGCCTTTTGCTGTGGGGTTTTGTTACCTGGTTTT | |
| | AATAACAGTAAATGTGCCCAGCCTCTTGGCCCCAGAACTGTACAGTATTGTGGCTGCACTTGCTCTAAGA | |
| | GTAGTTGATGTTGCATTTTCCTTATTGTTAAAAACATGTTAGAAGCAATGAATGTATATAAAAGCCTCAA | |
| | CTAGTCATTTTTTTCTCCTCTTCTTTTTTTTCATTATATCTAATTATTTTGCAGTTGGGCAACAGAGAAC | |
| | CATCCCTATTTTGTATTGAAGAGGGATTCACATCTGCATCTTAACTGCTCTTTATGAATGAAAAAACAGT | |
| | CCTCTGTATGTACTCCTCTTTACACTGGCCAGGGTCAGAGTTAAATAGAGTATATGCACTTTCCAAATTG | |
| | GGGACAAGGGCTCTAAAAAAAGCCCCAAAAGGAGAAGAACATCTGAGAACCTCCTCGGCCCTCCCAGTCC | |
| | CTCGCTGCACAAATACTCCGCAAGAGAGGCCAGAATGACAGCTGACAGGGTCTATGGCCATCGGGTCGTC | |
| | TCCGAAGATTTGGCAGGGGCAGAAAACTCTGGCAGGCTTAAGATTTGGAATAAAGTCACAGAATTAAGGA | |
| | AGCACCTCAATTTAGTTCAAACAAGACGCCAACATTCTCTCCACAGCTCACTTACCTCTCTGTGTTCAGA | |
| | TGTGGCCTTCCATTTATATGTGATCTTTGTTTTATTAGTAAATGCTTATCATCTAAAGATGTAGCTCTGG | |
| | CCCAGTGGGAAAAATTAGGAAGTGATTATAAATCGAGAGGAGTTATAATAATCAAGATTAAATGTAAATA | |
| | ATCAGGGCAATCCCAACACATGTCTAGCTTTCACCTCCAGGATCTATTGAGTGAACAGAATTGCAAATAG | |
| | TCTCTATTTGTAATTGAACTTATCCTAAAACAAATAGTTTATAAATGTGAACTTAAACTCTAATTAATTC | |
| | CAACTGTACTTTTAAGGCAGTGGCTGTTTTTAGACTTTCTTATCACTTATAGTTAGTAATGTACACCTAC | |
| | TCTATCAGAGAAAAACAGGAAAGGCTCGAAATACAAGCCATTCTAAGGAAATTAGGGAGTCAGTTGAAAT | |
| | TCTATTCTGATCTTATTCTGTGGTGTCTTTTGCAGCCCAGACAAATGTGGTTACACACTTTTTAAGAAAT | |
| | ACAATTCTACATTGTCAAGCTTATGAAGGTTCCAATCAGATCTTTATTGTTATTCAATTTGGATCTTTCA | |
| | GGGATTTTTTTTTTAAATTATTATGGGACAAAGGACATTTGTTGGAGGGGTGGGAGGGAGGAAGAATTTT | |
| | TAAATGTAAAACATTCCCAAGTTTGGATCAGGGAGTTGGAAGTTTTCAGAATAACCAGAACTAAGGGTAT | |
| | GAAGGACCTGTATTGGGGTCGATGTGATGCCTCTGCGAAGAACCTTGTGTGACAAATGAGAAACATTTTG | |
| | AAGTTTGTGGTACGACCTTTAGATTCCAGAGACATCAGCATGGCTCAAAGTGCAGCTCCGTTTGGCAGTG | |
| | CAATGGTATAAATTTCAAGCTGGATATGTCTAATGGGTATTTAAACAATAAATGTGCAGTTTTAACTAAC | |
| | AGGATATTTAATGACAACCTTCTGGTTGGTAGGGACATCTGTTTCTAAATGTTTATTATGTACAATACAG | |
| | AAAAAAATTTTATAAAATTAAGCAATGTGAAACTGAATTGGAGAGTGATAATACAAGTCCTTTAGTCTTA | |
| | CCCAGTGAATCATTCTGTTCCATGTCTTTGGACAACCATGACCTTGGACAATCATGAAATATGCATCTCA | |
| | CTGGATGCAAAGAAAATCAGATGGAGCATGAATGGTACTGTACCGGTTCATCTGGACTGCCCCAGAAAAA | |
| | TAACTTCAAGCAAACATCCTATCAACAACAAGGTTGTTCTGCATACCAAGCTGAGCACAGAAGATGGGAA | |
| | CACTGGTGGAGGATGGAAAGGCTCGCTCAATCAAGAAAATTCTGAGACTATTAATAAATAAGACTGTAGT | |
| | GTAGATACTGAGTAAATCCATGCACCTAAACCTTTTGGAAAATCTGCCGTGGGCCCTCCAGATAGCTCAT | |
| | TTCATTAAGTTTTTCCCTCCAAGGTAGAATTTGCAAGAGTGACAGTGGATTGCATTTCTTTTGGGGAAGC | |
| | TTTCTTTTGGTGGTTTTGTTTATTATACCTTCTTAAGTTTTCAACCAAGGTTTGCTTTTGTTTTGAGTTA | |
| | CTGGGGTTATTTTTGTTTTAAATAAAAATAAGTGTACAATAAGTGTTTTTGTATTGAAAGCTTTTGTTAT | |
| | CAAGATTTTCATACTTTTACCTTCCATGGCTCTTTTTAAGATTGATACTTTTAAGAGGTGGCTGATATTC | |
| | TGCAACACTGTACACATAAAAAATACGGTAAGGATACTTTACATGGTTAAGGTAAAGTAAGTCTCCAGTT | |
| | GGCCACCATTAGCTATAATGGCACTTTGTTTGTGTTGTTGGAAAAAGTCACATTGCCATTAAACTTTCCT | |
| | TGTCTGTCTAGTTAATATTGTGAAGAAAAATAAAGTACAGTGTGAGATACTG | |
| BIRC5 | CCCAGAAGGCCGCGGGGGGTGGACCGCCTAAGAGGGCGTGCGCTCCCGACATGCCCCGCGGCGCGCCATT | 217 |
| NM_001012271 | AACCGCCAGATTTGAATCGCGGGACCCGTTGGCAGAGGTGGCGGCGGCGGCATGGGTGCCCCGACGTTGC | |
| | CCCCTGCCTGGCAGCCCTTTCTCAAGGACCACCGCATCTCTACATTCAAGAACTGGCCCTTCTTGGAGGG | |
| | CTGCGCCTGCACCCCGGAGCGGATGGCCGAGGCTGGCTTCATCCACTGCCCCACTGAGAACGAGCCAGAC | |
| | TTGGCCCAGTGTTTCTTCTGCTTCAAGGAGCTGGAAGGCTGGGAGCCAGATGACGACCCCATTGGGCCGG | |
| | GCACGGTGGCTTACGCCTGTAATACCAGCACTTTGGGAGGCCGAGGCGGGCGGATCACGAGAGAGGAACA | |
| | TAAAAAGCATTCGTCCGGTTGCGCTTTCCTTTCTGTCAAGAAGCAGTTTGAAGAATTAACCCTTGGTGAA | |
| | TTTTTGAAACTGGACAGAGAAAGAGCCAAGAACAAAATTGCAAAGGAAACCAACAATAAGAAGAAAGAAT | |
| | TTGAGGAAACTGCGGAGAAAGTGCGCCGTGCCATCGAGCAGCTGGCTGCCATGGATTGAGGCCTCTGGCC | |
| | GGAGCTGCCTGGTCCCAGAGTGGCTGCACCACTTCCAGGGTTTATTCCCTGGTGCCACCAGCCTTCCTGT | |
| | GGGCCCCTTAGCAATGTCTTAGGAAAGGAGATCAACATTTTCAAATTAGATGTTTCAACTGTGCTCTTGT | |
| | TTTGTCTTGAAAGTGGCACCAGAGGTGCTTCTGCCTGTGCAGCGGGTGCTGCTGGTAACAGTGGCTGCTT | |
| | CTCTCTCTCTCTCTCTTTTTTGGGGGCTCATTTTTGCTGTTTTGATTCCCGGGCTTACCAGGTGAGAAGT | |
| | GAGGGAGGAAGAAGGCAGTGTCCCTTTTGCTAGAGCTGACAGCTTTGTTCGCGTGGGCAGAGCCTTCCAC | |
| | AGTGAATGTGTCTGGACCTCATGTTGTTGAGGCTGTCACAGTCCTGAGTGTGGACTTGGCAGGTGCCTGT | |
| | TGAATCTGAGCTGCAGGTTCCTTATCTGTCACACCTGTGCCTCCTCAGAGGACAGTTTTTTTGTTGTTGT | |
| | GTTTTTTTGTTTTTTTTTTTTTGGTAGATGCATGACTTGTGTGTGATGAGAGAATGGAGACAGAGTCCCT | |
| | GGCTCCTCTACTGTTTAACAACATGGCTTTCTTATTTTGTTTGAATTGTTAATTCACAGAATAGCACAAA | |
| | CTACAATTAAAACTAAGCACAAAGCCATTCTAAGTCATTGGGGAAACGGGGTGAACTTCAGGTGGATGAG | |
| | GAGACAGAATAGAGTGATAGGAAGCGTCTGGCAGATACTCCTTTTGCCACTGCTGTGTGATTAGACAGGC | |
| | CCAGTGAGCCGCGGGGCACATGCTGGCCGCTCCTCCCTCAGAAAAAGGCAGTGGCCTAAATCCTTTTTAA | |
| | ATGACTTGGCTCGATGCTGTGGGGGACTGGCTGGGCTGCTGCAGGCCGTGTGTCTGTCAGCCCAACCTTC | |
| | ACATCTGTCACGTTCTCCACACGGGGGAGAGACGCAGTCCGCCCAGGTCCCCGCTTTCTTTGGAGGCAGC | |
| | AGCTCCCGCAGGGCTGAAGTCTGGCGTAAGATGATGGATTTGATTCGCCCTCCTCCCTGTCATAGAGCTG | |
| | CAGGGTGGATTGTTACAGCTTCGCTGGAAACCTCTGGAGGTCATCTCGGCTGTTCCTGAGAAATAAAAAG | |
| | CCTGTCATTTCAAACACTGCTGTGGACCCTACTGGGTTTTTAAAATATTGTCAGTTTTTCATCGTCGTCC | |
| | CTAGCCTGCCAACAGCCATCTGCCCAGACAGCCGCAGTGAGGATGAGCGTCCTGGCAGAGACGCAGTTGT | |
| | CTCTGGGCGCTTGCCAGAGCCACGAACCCCAGACCTGTTTGTATCATCCGGGCTCCTTCCGGGCAGAAAC | |
| | AACTGAAAATGCACTTCAGACCCACTTATTTCTGCCACATCTGAGTCGGCCTGAGATAGACTTTTCCCTC | |
| | TAAACTGGGAGAATATCACAGTGGTTTTTGTTAGCAGAAAATGCACTCCAGCCTCTGTACTCATCTAAGC | |
| | TGCTTATTTTTGATATTTGTGTCAGTCTGTAAATGGATACTTCACTTTAATAACTGTTGCTTAGTAATTG | |
| | GCTTTGTAGAGAAGCTGGAAAAAAATGGTTTTGTCTTCAACTCCTTTGCATGCCAGGCGGTGATGTGGAT | |
| | CTCGGCTTCTGTGAGCCTGTGCTGTGGGCAGGGCTGAGCTGGAGCCGCCCCTCTCAGCCCGCCTGCCACG | |
| | GCCTTTCCTTAAAGGCCATCCTTAAAACCAGACCCTCATGGCTACCAGCACCTGAAAGCTTCCTCGACAT | |
| | CTGTTAATAAAGCCGTAGGCCCTTGTCTAAGTGCAACCGCCTAGACTTTCTTTCAGATACATGTCCACAT | |
| | GTCCATTTTTCAGGTTCTCTAAGTTGGAGTGGAGTCTGGGAAGGGTTGTGAATGAGGCTTCTGGGCTATG | |
| | GGTGAGGTTCCAATGGCAGGTTAGAGCCCCTCGGGCCAACTGCCATCCTGGAAAGTAGAGACAGCAGTGC | |
| | CCGCTGCCCAGAAGAGACCAGCAAGCCAAACTGGAGCCCCCATTGCAGGCTGTCGCCATGTGGAAAGAGT | |
| | AACTCACAATTGCCAATAAAGTCTCATGTGGTTTTATCTAAAAAAAAAAAAAAAAAAAAAAAAA | |
| BLVRA | AATGAGGGTATTTATAAACTACTTAAATTATAAAAAGAATGAGACATCAGACTTACAGTTTTGGATACTA | 218 |
| BX647539 | ATTTTTTTCACTTAACGTTCATTATGTGATAGGAGTTTTCCATCCTATTATACCGCTGTGCGATCTGATC | |
| | TTGGGCACGTTAACCAACCTCTTGTTGCCTCGATTTTCTCACCTGTAAAAGTGGGGGTAATCATAATGCT | |
| | TACTTAGTAGGATAGCCCTGAAGAATAAGTGACTTAGCGAACATAAATAGCTTACAATAGGGTTTTCAGC | |
| | ATGGGAAGGATTCAGTAAATGTTAGCTGTCATCATCACCACCTACAAAGGAAGCAATACTGTGCTGAAAG | |
| | TTTTTCCATCATTAATGTAATTTCTATAGTACGATTCCCAAGAAGATATTAAAATTATGGAAATAAAGGT | |
| | ATTGGTATATTCCTAATTATTTCCTAAAAGATTGTATTGATAAATATGCTCATCCTTCCCTTAACGGGAT | |
| | GCATTCCAGAAAAACAAGTCAAATGTTAGACAAAGTATCAGAAGGGAAATTCTGTAGCCAGAGAGCTAAA | |
| | AATTACAATAGGGTCTCTAATTATACTTCAACTTTTTTAGGAATAATTCTCAGTGTGTTTTCCCACATTT | |
| | CATATGTAATTTTTTTTTTTTTTTTTTTTTGAGACAGAGCCTCGCCCTGTCACCAGGCTGGAGTACAGTG | |
| | GCGCGATCTCGGCTCACTGCAACTTCCACCTGCTGGGTTCAAGCAATTCTTCTGACCTCAGGTGATCCAC | |
| | CCGCCTCGGCCTCCCAAAGTGCTGGGATTATAACAGGCGTGGCATGAGTCACCGCGCCCGGCCGATCTTT | |
| | ACTTTTTTATTCTTTGTACCCCCTGCCTATCCAGTTAGCATGTGATTAAAGTCAAAGATTTGCCACTTTG | |
| | GGCCACATCTATTAATTTTCATCTTTGTTATAATTGTATTTAGTTTTTGATCTACACTGCTTATTACTCC | |
| | CAGTCATTTTTTATAGAACTGAAAATCTGGTAAAATACTCAAAATTGCACTGACTTCTATGTAGAGGCGA | |
| | CACTCCATCAGAACCGTGGGCTGACAGGGAATCCCACTGTGCAGGAGCTGCGCGCATTTTCATTTCTGAT | |
| | TCTCTTTGGCGTATCCAGGACTCTGATGACATGATCATATATTTATCAGTAGTAACAGGTTGGGCCATTT | |
| | GTTTTTTGTGGTAAATCATATATTTAAGATTTTAGAAATAAGTTGATAGCCATGTATTTTGGAATTTGAA | |
| | AAAGACATTGCATTACTCAGCTTCAAATTAAGCTTTAATCAAATAGTGAAACTTTCCATTAATGGACAGT | |
| | GTATACCTTTTTGTGTATTTAAAAAAAAAAACACTGAATATAGTGCCTTTGTGACAGGGGAGCTTGGTTC | |
| | CTGACAATGTCCTCTTGAGCCTTTTTTTTTTTTTTGAGATGGAGTCTCACTGTGTCACCCAGGCTGGAGT | |
| | GCAGTGGCGCCATCTTGGCTCACTGCAACCTCCGCCCCCTGGGTTCAAGTGATTCTCATTCCTCAGCTTC | |
| | CTAAGTAGCTGGGATTACAGGCACGCACCACCATGACCAGCTAATTTTTATACTTTTAGTAGAGACAGGG | |
| | TTTTGCCATGTTGGCTAGGTTGGTCTCGAACTCCTGACCTCAAGTAATCCACCCACCATGGCCTCCCCAA | |
| | AGTGCTGGGATTACAGGCGTGAGCCATTTCACCCGGCCTCTCTTCCGTCTTTGAGCTGTGAGGAAATAGC | |
| | TACATTACATGAGCTGCTAGATCTGCCTTATGGTCAGAAATGAAGGTTGAACTCTCAGGAACAGTGACAT | |
| | ATATACACACTGATATTTCCAAAGTACAATGCCCCAAATTGATCCACAAAGGAATTAAGGTCATTTGCAA | |
| | CAAAATCACAGAATAGTAACAAATAAATAGAAGATAAATATGGCCAGGGATGCTGCAAACTGATATACTG | |
| | CCAAGTTTATCAGTTGGGAATCCCAACAGTGAAAAGCATAAAAATGAAAGGAATTTTAAGGAGACTTTTT | |
| | ATAGAAGAGTGGGAAGGATTGGAGGAGCCAACAAGTGATGGTGAGGCACACAGGGAAGAGCTTCAGTGGG | |
| | CACCATCCCCTCTCTGGTTTGAAGGGGTAGGGAGGGGACCAGAGCTGGGAGGAGGGGGCTGGAATACTGC | |
| | TGGAGGAGCCACTCCCTTCCAGACCTGCTGTGGCCATCACAGAATGCAGCCACTGCCAGAGCAGCAGCCC | |
| | GAGGAACCAGGCAGGGGGAGCACAAGTACCCTAGCCTCTCTCTTTCTGTTTCTTGCCTGCCGATCTCCTC | |
| | CACTGGCTAAACCCAGCTGGATGCTAAGAGTACAGTCAGCCTGCCTGCTGAGGAGGGACCACCAGGGACC | |
| | ACCATCAGCAAGGGATCCAATGTCTTTCTGCCTCTGCAGAATGAAGGTTGGGGCGCGGGGGGCGCTCTAC | |
| | TTCTTAGGGATATTGTGGGAATAAAAGGAAATAGGCAAAAAATGTTTTTGAAAAACAAAGCACATACTGC | |
| | GCACCCGTGGGCCACTACTGCTTTTGACCCCTGGCTCTGTTTCATGAAGTAATGTCGTGTCATTCTCTTT | |
| | TTAGGTGCTACAGGATTTCTTTAGGTTTGTTTTCTGTCCACCATATTTCAACTCATGTGTGCTGTTTGTT | |
| | GTGCTAAAACAAATATTTGCTGATGCCTGAGTGAATAGTTGAATATTTTATATAAGTCAAATTTATACGT | |
| | AATGATTTTTCTTGTAACTTAGCCGTTTCTCTTTTACAAACTCAGAAAACCTCAGACTTTGAAAAGGCCT | |
| | TGAAGTTCCTCACCTGAAATCTGAGAACTTGGAGCGCCTTAAAAAATCTAAAGGAAAACAAAACAGTGAA | |
| | AGAACATGATATAGTCAGTGTAGAGAATAAAATTATTTATGTAATTAATATTGAGGATGCAGATAACACA | |
| | TTGTGAAATCTTGCTTGTAAAAAATCTCGATCTGCTGAAGAAAGATGTTCTCTCTAGAGATCTTTGAAAG | |
| | CATAATTATTGAGCTTTTAAAATGTTAGAAACAAAAGTTAGACCCACACATATTCTGGCGTGTGGAAGAT | |
| | TTGCATTCCTTCCCCTGCCCGCCCCGCCCCCACACTTGTGAGTTGTGCCTGTGTACGCAGTTCCTGTAGC | |
| | ACTCGGCTGGGCAGAAATCATCTTTCAGCACTAAGGGAACATAGTTATGATCTGGACCTTCTGGGAGTGG | |
| | TCAGTGCCCAAGAACAGGTATGGGACTCCAGAAAGTTCTGCTCTCAACCCTATTTTGAAATAGAGTTACA | |
| | CATTGTTCTACAATTATTTGAGTTAATAAGCAGCTCTTTTCAAACGTGATTATGCCCTTCCAAGTTTAAA | |
| | TACACTAGACTTTAGTGAAAGTAATTGACCTCATCTCATTTCTCTCCTGTTATATTAAGATCACTTTCAG | |
| | TAAAAGGTAGAAGCTTTTGAAGTGGTGAGGAGGAGGTAGAGGAGGGACATAGAGCAGATAGGGGCTGGAA | |
| | AGTGGGGTGAGGAAGAGAGTGGCTTCTCTTTGGCAGAGTACCAAGGAAAAGCCCTATCTGTACAGAACCT | |
| | TTGTGCCTGGGAACTTGATGGCTGCAACCTGAGCCTCAACCTAGTTTGCTTGCGGAGCCAGAAGAGAAGC | |
| | TAAAAACCTTCAGTTAACCAAGCCAGACACCAAGAAAGTTAAACCGAAAGAGAACCCCCCACCCCCCGCA | |
| | AAAAAAAGAAGTAAAGTGGGTTAAAGTGATATCATGTTAGCACAGAAAGAGAACATAAGGGTCATCTAAG | |
| | TTCATCTGCCCCCTCTTCTATTTCAAGGTGCAGAAACTAAGGCACAAGGGACCCCGTGTCCTGCTCTTGA | |
| | TCACATAGCTAGTGGGTGCCAAGCCAGGTCTAGAACTCTGTTCTCTGGGGTCACAGGCTGGCTCTTCATC | |
| | CCTCTAGAGAGATAGCTCATCTGTGTGCACCTGAGCCCGTTGTGTTTCGGAGTCAAAGCAAATAAAGGCT | |
| | CAAACTCCAAGACTGTTTTGCAGACCGGCTGCAGTAGATATGGGGGGAGGAGAAACCTGCTTTAAATTGC | |
| | TTCAAGCAAGTTGTTTCTGCAAAGGTGTTGACTTTTTTCTTTCAACTTTCTAGTGAGTCACTGCAGCCTG | |
| | AGCTGTTATTTGTCATTATGCAATAATTCAGGAACTAACTCAAGATTCTTCTTTTTAAATTATTTGTTTA | |
| | TTTAGAGACAGAGTCTTGCTCTGTTGCCCAGGCTGGAGTGCAGTGGTGTGATCTCGGCTCACTGCAGCCT | |
| | CTGCCTCCTGGGTTCAAGCAATTCTCATGTCTCAGCCTCCCGAATAGCTGGTATTGCAGGCTCGTGCCAC | |
| | CACCCCCTGCTAATTTTTGTAATTTTAGTGGAGACACGGTTTCGCCATGTTGGCCGGGCTCGTCTTGAGC | |
| | TCCTGGCCTCAGGTGATCCGCCCGCCTCGGCCTCCCAAAGTGCTGGGATTGCAGCCGTGAGCCTCCACAC | |
| | CCGGCCTATTTATTTATTTTTAAATTGGCTGCTCTTAGAAAGGCATACCATGTTTCTGGATGGGAAGGCT | |
| | TATTAATTCACCCTAATTTAATGTATAAATTTGATGCAATCATAGTCACAGTCCCAGTGGAATTTTTTAA | |
| | CTTGGTAAGATGTTCTAAAATTAATGAGAGAACTTGAATTACCAGGTATTGAAACACTGTAAAGCCACAA | |
| | TCATGTAAACAGTATGTTATAACCATGGGAATAGAGGTCTGTGATACAGCAGAAAAAAGTGAAAAAAAGA | |
| | ATAACTGTATTCATAAAAATTTAAATGTGGAGTCACTGGGGGAAAGGATTAAATATTCGATAATGTAGAA | |
| | ACAACTCAACTATTTGGAGAAATGTAAATTTAGAGCCTTATCTCATGCCATATACCAAAATACTATTTAG | |
| | ATTTGATTAAAAAATAAAAAAAAAAAAAAAAAAA | |
| CCNB1 | CGAACGCCTTCGCGCGATCGCCCTGGAAACGCATTCTCTGCGACCGGCAGCCGCCAATGGGAAGGGAGTG | 219 |
| NM_031966 | AGTGCCACGAACAGGCCAATAAGGAGGGAGCAGTGCGGGGTTTAAATCTGAGGCTAGGCTGGCTCTTCTC | |
| | GGCGTGCTGCGGCGGAACGGCTGTTGGTTTCTGCTGGGTGTAGGTCCTTGGCTGGTCGGGCCTCCGGTGT | |
| | TCTGCTTCTCCCCGCTGAGCTGCTGCCTGGTGAAGAGGAAGCCATGGCGCTCCGAGTCACCAGGAACTCG | |
| | AAAATTAATGCTGAAAATAAGGCGAAGATCAACATGGCAGGCGCAAAGCGCGTTCCTACGGCCCCTGCTG | |
| | CAACCTCCAAGCCCGGACTGAGGCCAAGAACAGCTCTTGGGGACATTGGTAACAAAGTCAGTGAACAACT | |
| | GCAGGCCAAAATGCCTATGAAGAAGGAAGCAAAACCTTCAGCTACTGGAAAAGTCATTGATAAAAAACTA | |
| | CCAAAACCTCTTGAAAAGGTACCTATGCTGGTGCCAGTGCCAGTGTCTGAGCCAGTGCCAGAGCCAGAAC | |
| | CTGAGCCAGAACCTGAGCCTGTTAAAGAAGAAAAACTTTCGCCTGAGCCTATTTTGGTTGATACTGCCTC | |
| | TCCAAGCCCAATGGAAACATCTGGATGTGCCCCTGCAGAAGAAGACCTGTGTCAGGCTTTCTCTGATGTA | |
| | ATTCTTGCAGTAAATGATGTGGATGCAGAAGATGGAGCTGATCCAAACCTTTGTAGTGAATATGTGAAAG | |
| | ATATTTATGCTTATCTGAGACAACTTGAGGAAGAGCAAGCAGTCAGACCAAAATACCTACTGGGTCGGGA | |
| | AGTCACTGGAAACATGAGAGCCATCCTAATTGACTGGCTAGTACAGGTTCAAATGAAATTCAGGTTGTTG | |
| | CAGGAGACCATGTACATGACTGTCTCCATTATTGATCGGTTCATGCAGAATAATTGTGTGCCCAAGAAGA | |
| | TGCTGCAGCTGGTTGGTGTCACTGCCATGTTTATTGCAAGCAAATATGAAGAAATGTACCCTCCAGAAAT | |
| | TGGTGACTTTGCTTTTGTGACTGACAACACTTATACTAAGCACCAAATCAGACAGATGGAAATGAAGATT | |
| | CTAAGAGCTTTAAACTTTGGTCTGGGTCGGCCTCTACCTTTGCACTTCCTTCGGAGAGCATCTAAGATTG | |
| | GAGAGGTTGATGTCGAGCAACATACTTTGGCCAAATACCTGATGGAACTAACTATGTTGGACTATGACAT | |
| | GGTGCACTTTCCTCCTTCTCAAATTGCAGCAGGAGCTTTTTGCTTAGCACTGAAAATTCTGGATAATGGT | |
| | GAATGGACACCAACTCTACAACATTACCTGTCATATACTGAAGAATCTCTTCTTCCAGTTATGCAGCACC | |
| | TGGCTAAGAATGTAGTCATGGTAAATCAAGGACTTACAAAGCACATGACTGTCAAGAACAAGTATGCCAC | |
| | ATCGAAGCATGCTAAGATCAGCACTCTACCACAGCTGAATTCTGCACTAGTTCAAGATTTAGCCAAGGCT | |
| | GTGGCAAAGGTGTAACTTGTAAACTTGAGTTGGAGTACTATATTTACAAATAAAATTGGCACCATGTGCC | |
| | ATCTGTACATATTACTGTTGCATTTACTTTTAATAAAGCTTGTGGCCCCTTTTACTTTTTTATAGCTTAA | |
| | CTAATTTGAATGTGGTTACTTCCTACTGTAGGGTAGCGGAAAAGTTGTCTTAAAAGGTATGGTGGGGATA | |
| | TTTTTAAAAACTCCTTTTGGTTTACCTGGGGATCCAATTGATGTATATGTTTATATACTGGGTTCTTGTT | |
| | TTATATACCTGGCTTTTACTTTATTAATATGAGTTACTGAAGGTGATGGAGGTATTTGAAAATTTTACTT | |
| | CCATAGGACATACTGCATGTAAGCCAAGTCATGGAGAATCTGCTGCATAGCTCTATTTTAAAGTAAAAGT | |
| | CTACCACCGAATCCCTAGTCCCCCTGTTTTCTGTTTCTTCTTGTGATTGCTGCCATAATTCTAAGTTATT | |
| | TACTTTTACCACTATTTAAGTTATCAACTTTAGCTAGTATCTTCAAACTTTCACTTTGAAAAATGAGAAT | |
| | TTTATATTCTAAGCCAGTTTTCATTTTGGTTTTGTGTTTTGGTTAATAAAACAATACTCAAATACAAAAA | |
| | AAAAAAA | |
| CCNE1 | GCGGCCGCCAGCGCGGTGTAGGGGGCAGGCGCGGATCCCGCCACCGCCGCGCGCTCGGCCCGCCGACTCC | 220 |
| BC035498 | CGGCGCCGCCGCCGCCACTGCCGTCGCCGCCGCCGCCTGCCGGGACTGGAGCGCGCCGTCCGCCGCGGAC | |
| | AAGACCCTGGCCTCAGGCCGGAGCAGCCCCATCATGCCGAGGGAGCGCAGGGAGCGGGATGCGAAGGAGC | |
| | GGGACACCATGAAGGAGGACGGCGGCGCGGAGTTCTCGGCTCGCTCCAGGAAGAGGAAGGCAAACGTGAC | |
| | CGTTTTTTTGCAGGATCCAGATGAAGAAATGGCCAAAATCGACAGGACGGCGAGGGACCAGTGTGGGAGC | |
| | CAGCCTTGGGACAATAATGCAGTCTGTGCAGACCCCTGCTCCCTGATCCCCACACCTGACAAAGAAGATG | |
| | ATGACCGGGTTTACCCAAACTCAACGTGCAAGCCTCGGATTATTGCACCATCCAGAGGCTCCCCGCTGCC | |
| | TGTACTGAGCTGGGCAAATAGAGAGGAAGTCTGGAAAATCATGTTAAACAAGGAAAAGACATACTTAAGG | |
| | GATCAGCACTTTCTTGAGCAACACCCTCTTCTGCAGCCAAAAATGCGAGCAATTCTTCTGGATTGGTTAA | |
| | TGGAGGTGTGTGAAGTCTATAAACTTCACAGGGAGACCTTTTACTTGGCACAAGATTTCTTTGACCGGTA | |
| | TATGGCGACACAAGAAAATGTTGTAAAAACTCTTTTACAGCTTATTGGGATTTCATCTTTATTTATTGCA | |
| | GCCAAACTTGAGGAAATCTATCCTCCAAAGTTGCACCAGTTTGCGTATGTGACAGATGGAGCTTGTTCAG | |
| | GAGATGAAATTCTCACCATGGAATTAATGATTATGAAGGCCCTTAAGTGGCGTTTAAGTCCCCTGACTAT | |
| | TGTGTCCTGGCTGAATGTATACATGCAGGTTGCATATCTAAATGACTTACATGAAGTGCTACTGCCGCAG | |
| | TATCCCCAGCAAATCTTTATACAGATTGCAGAGCTGTTGGATCTCTGTGTCCTGGATGTTGACTGCCTTG | |
| | AATTTCCTTATGGTATACTTGCTGCTTCGGCCTTGTATCATTTCTCGTCATCTGAATTGATGCAAAAGGT | |
| | TTCAGGGTATCAGTGGTGCGACATAGAGAACTGTGTCAAGTGGATGGTTCCATTTGCCATGGTTATAAGG | |
| | GAGACGGGGAGCTCAAAACTGAAGCACTTCAGGGGCGTCGCTGATGAAGATGCACACAACATACAGACCC | |
| | ACAGAGACAGCTTGGATTTGCTGGACAAAGCCCGAGCAAAGAAAGCCATGTTGTCTGAACAAAATAGGGC | |
| | TTCTCCTCTCCCCAGTGGGCTCCTCACCCCGCCACAGAGCGGTAAGAAGCAGAGCAGCGGGCCGGAAATG | |
| | GCGTGACCACCCCATCCTTCTCCACCAAAGACAGTTGCGCGCCTGCTCCACGTTCTCTTCTGTCTGTTGC | |
| | AGCGGAGGCGTGCGTTTGCTTTTACAGATATCTGAATGGAAGAGTGTTTCTTCCACAACAGAAGTATTTC | |
| | TGTGGATGGCATCAAACAGGGCAAAGTGTTTTTTATTGAATGCTTATAGGTTTTTTTTAAATAAGTGGGT | |
| | CAAGTACACCAGCCACCTCCAGACACCAGTGCGTGCTCCCGATGCTGCTATGGAAGGTGCTACTTGACCT | |
| | AAGGGACTCCCACAACAACAAAAGCTTGAAGCTGTGGAGGGCCACGGTGGCGTGGCTCTCCTCGCAGGTG | |
| | TTCTGGGCTCCGTTGTACCAAGTGGAGCAGGTGGTTGCGGGCAAGCGTTGTGCAGAGCCCATAGCCAGCT | |
| | GGGCAGGGGGCTGCCCTCTCCACATTATCAGTTGACAGTGTACAATGCCTTTGATGAACTGTTTTGTAAG | |
| | TGCTGCTATATCTATCCATTTTTTAATAAAGATAATACTGTTTTTGAAAAAAAAAAAAAAAAAAAAAAAA | |
| | AAAAAAAAAAAAAAAAAAAAAAAAAAAAAAAAAAAAAAAAAAAAAAAAAAA | |
| CDC2/CDK1 | AGCGCGGTGAGTTTGAAACTGCTCGCACTTGGCTTCAAAGCTGGCTCTTGGAAATTGAGCGGAGAGCGAC | 221 |
| NM_001786.4 | GCGGTTGTTGTAGCTGCCGCTGCGGCCGCCGCGGAATAATAAGCCGGGATCTACCATACCCATTGACTAA | |
| | CTATGGAAGATTATACCAAAATAGAGAAAATTGGAGAAGGTACCTATGGAGTTGTGTATAAGGGTAGACA | |
| | CAAAACTACAGGTCAAGTGGTAGCCATGAAAAAAATCAGACTAGAAAGTGAAGAGGAAGGGGTTCCTAGT | |
| | ACTGCAATTCGGGAAATTTCTCTATTAAAGGAACTTCGTCATCCAAATATAGTCAGTCTTCAGGATGTGC | |
| | TTATGCAGGATTCCAGGTTATATCTCATCTTTGAGTTTCTTTCCATGGATCTGAAGAAATACTTGGATTC | |
| | TATCCCTCCTGGTCAGTACATGGATTCTTCACTTGTTAAGAGTTATTTATACCAAATCCTACAGGGGATT | |
| | GTGTTTTGTCACTCTAGAAGAGTTCTTCACAGAGACTTAAAACCTCAAAATCTCTTGATTGATGACAAAG | |
| | GAACAATTAAACTGGCTGATTTTGGCCTTGCCAGAGCTTTTGGAATACCTATCAGAGTATATACACATGA | |
| | GGTAGTAACACTCTGGTACAGATCTCCAGAAGTATTGCTGGGGTCAGCTCGTTACTCAACTCCAGTTGAC | |
| | ATTTGGAGTATAGGCACCATATTTGCTGAACTAGCAACTAAGAAACCACTTTTCCATGGGGATTCAGAAA | |
| | TTGATCAACTCTTCAGGATTTTCAGAGCTTTGGGCACTCCCAATAATGAAGTGTGGCCAGAAGTGGAATC | |
| | TTTACAGGACTATAAGAATACATTTCCCAAATGGAAACCAGGAAGCCTAGCATCCCATGTCAAAAACTTG | |
| | GATGAAAATGGCTTGGATTTGCTCTCGAAAATGTTAATCTATGATCCAGCCAAACGAATTTCTGGCAAAA | |
| | TGGCACTGAATCATCCATATTTTAATGATTTGGACAATCAGATTAAGAAGATGTAGCTTTCTGACAAAAA | |
| | GTTTCCATATGTTATATCAACAGATAGTTGTGTTTTTATTGTTAACTCTTGTCTATTTTTGTCTTATATA | |
| | TATTTCTTTGTTATCAAACTTCAGCTGTACTTCGTCTTCTAATTTCAAAAATATAACTTAAAAATGTAAA | |
| | TATTCTATATGAATTTAAATATAATTCTGTAAATGTGTGTAGGTCTCACTGTAACAACTATTTGTTACTA | |
| | TAATAAAACTATAATATTGATGTCAGGAATCAGGAAAAAATTTGAGTTGGCTTAAATCATCTCAGTCCTT | |
| | ATGGCAGTTTTATTTTCCTGTAGTTGGAACTACTAAAATTTAGGAAAATGCTAAGTTCAAGTTTCGTAAT | |
| | GCTTTGAAGTATTTTTATGCTCTGAATGTTTAAATGTTCTCATCAGTTTCTTGCCATGTTGTTAACTATA | |
| | CAACCTGGCTAAAGATGAATATTTTTCTACTGGTATTTTAATTTTTGACCTAAATGTTTAAGCATTCGGA | |
| | ATGAGAAAACTATACAGATTTGAGAAATGATGCTAAATTTATAGGAGTTTTCAGTAACTTAAAAAGCTAA | |
| | CATGAGAGCATGCCAAAATTTGCTAAGTCTTACAAAGATCAAGGGCTGTCCGCAACAGGGAAGAACAGTT | |
| | TTGAAAATTTATGAACTATCTTATTTTTAGGTAGGTTTTGAAAGCTTTTTGTCTAAGTGAATTCTTATGC | |
| | CTTGGTCAGAGTAATAACTGAAGGAGTTGCTTATCTTGGCTTTCGAGTCTGAGTTTAAAACTACACATTT | |
| | TGACATAGTGTTTATTAGCAGCCATCTAAAAAGGCTCTAATGTATATTTAACTAAAATTACTAGCTTTGG | |
| | GAATTAAACTGTTTAACAAATAAAAAAAAAAAA | |
| CDC6 | GAGCGCGGCTGGAGTTTGCTGCTGCCGCTGTGCAGTTTGTTCAGGGGCTTGTGGTGGTGAGTCCGAGAGG | 222 |
| NM_001254 | CTGCGTGTGAGAGACGTGAGAAGGATCCTGCACTGAGGAGGTGGAAAGAAGAGGATTGCTCGAGGAGGCC | |
| | TGGGGTCTGTGAGGCAGCGGAGCTGGGTGAAGGCTGCGGGTTCCGGCGAGGCCTGAGCTGTGCTGTCGTC | |
| | ATGCCTCAAACCCGATCCCAGGCACAGGCTACAATCAGTTTTCCAAAAAGGAAGCTGTCTCGGGCATTGA | |
| | ACAAAGCTAAAAACTCCAGTGATGCCAAACTAGAACCAACAAATGTCCAAACCGTAACCTGTTCTCCTCG | |
| | TGTAAAAGCCCTGCCTCTCAGCCCCAGGAAACGTCTGGGCGATGACAACCTATGCAACACTCCCCATTTA | |
| | CCTCCTTGTTCTCCACCAAAGCAAGGCAAGAAAGAGAATGGTCCCCCTCACTCACATACACTTAAGGGAC | |
| | GAAGATTGGTATTTGACAATCAGCTGACAATTAAGTCTCCTAGCAAAAGAGAACTAGCCAAAGTTCACCA | |
| | AAACAAAATACTTTCTTCAGTTAGAAAAAGTCAAGAGATCACAACAAATTCTGAGCAGAGATGTCCACTG | |
| | AAGAAAGAATCTGCATGTGTGAGACTATTCAAGCAAGAAGGCACTTGCTACCAGCAAGCAAAGCTGGTCC | |
| | TGAACACAGCTGTCCCAGATCGGCTGCCTGCCAGGGAAAGGGAGATGGATGTCATCAGGAATTTCTTGAG | |
| | GGAACACATCTGTGGGAAAAAAGCTGGAAGCCTTTACCTTTCTGGTGCTCCTGGAACTGGAAAAACTGCC | |
| | TGCTTAAGCCGGATTCTGCAAGACCTCAAGAAGGAACTGAAAGGCTTTAAAACTATCATGCTGAATTGCA | |
| | TGTCCTTGAGGACTGCCCAGGCTGTATTCCCAGCTATTGCTCAGGAGATTTGTCAGGAAGAGGTATCCAG | |
| | GCCAGCTGGGAAGGACATGATGAGGAAATTGGAAAAACATATGACTGCAGAGAAGGGCCCCATGATTGTG | |
| | TTGGTATTGGACGAGATGGATCAACTGGACAGCAAAGGCCAGGATGTATTGTACACGCTATTTGAATGGC | |
| | CATGGCTAAGCAATTCTCACTTGGTGCTGATTGGTATTGCTAATACCCTGGATCTCACAGATAGAATTCT | |
| | ACCTAGGCTTCAAGCTAGAGAAAAATGTAAGCCACAGCTGTTGAACTTCCCACCTTATACCAGAAATCAG | |
| | ATAGTCACTATTTTGCAAGATCGACTTAATCAGGTATCTAGAGATCAGGTTCTGGACAATGCTGCAGTTC | |
| | AATTCTGTGCCCGCAAAGTCTCTGCTGTTTCAGGAGATGTTCGCAAAGCACTGGATGTTTGCAGGAGAGC | |
| | TATTGAAATTGTAGAGTCAGATGTCAAAAGCCAGACTATTCTCAAACCACTGTCTGAATGTAAATCACCT | |
| | TCTGAGCCTCTGATTCCCAAGAGGGTTGGTCTTATTCACATATCCCAAGTCATCTCAGAAGTTGATGGTA | |
| | ACAGGATGACCTTGAGCCAAGAAGGAGCACAAGATTCCTTCCCTCTTCAGCAGAAGATCTTGGTTTGCTC | |
| | TTTGATGCTCTTGATCAGGCAGTTGAAAATCAAAGAGGTCACTCTGGGGAAGTTATATGAAGCCTACAGT | |
| | AAAGTCTGTCGCAAACAGCAGGTGGCGGCTGTGGACCAGTCAGAGTGTTTGTCACTTTCAGGGCTCTTGG | |
| | AAGCCAGGGGCATTTTAGGATTAAAGAGAAACAAGGAAACCCGTTTGACAAAGGTGTTTTTCAAGATTGA | |
| | AGAGAAAGAAATAGAACATGCTCTGAAAGATAAAGCTTTAATTGGAAATATCTTAGCTACTGGATTGCCT | |
| | TAAATTCTTCTCTTACACCCCACCCGAAAGTATTCAGCTGGCATTTAGAGAGCTACAGTCTTCATTTTAG | |
| | TGCTTTACACATTCGGGCCTGAAAACAAATATGACCTTTTTTACTTGAAGCCAATGAATTTTAATCTATA | |
| | GATTCTTTAATATTAGCACAGAATAATATCTTTGGGTCTTACTATTTTTACCCATAAAAGTGACCAGGTA | |
| | GACCCTTTTTAATTACATTCACTACTTCTACCACTTGTGTATCTCTAGCCAATGTGCTTGCAAGTGTACA | |
| | GATCTGTGTAGAGGAATGTGTGTATATTTACCTCTTCGTTTGCTCAAACATGAGTGGGTATTTTTTTGTT | |
| | TGTTTTTTTTGTTGTTGTTGTTTTTGAGGCGCGTCTCACCCTGTTGCCCAGGCTGGAGTGCAATGGCGCG | |
| | TTCTCTGCTCACTACAGCACCCGCTTCCCAGGTTGAAGTGATTCTCTTGCCTCAGCCTCCCGAGTAGCTG | |
| | GGATTACAGGTGCCCACCACCGCGCCCAGCTAATTTTTTAATTTTTAGTAGAGACAGGGTTTTACCATGT | |
| | TGGCCAGGCTGGTCTTGAACTCCTGACCCTCAAGTGATCTGCCCACCTTGGCCTCCCTAAGTGCTGGGAT | |
| | TATAGGCGTGAGCCACCATGCTCAGCCATTAAGGTATTTTGTTAAGAACTTTAAGTTTAGGGTAAGAAGA | |
| | ATGAAAATGATCCAGAAAAATGCAAGCAAGTCCACATGGAGATTTGGAGGACACTGGTTAAAGAATTTAT | |
| | TTCTTTGTATAGTATACTATGTTCATGGTGCAGATACTACAACATTGTGGCATTTTAGACTCGTTGAGTT | |
| | TCTTGGGCACTCCCAAGGGCGTTGGGGTCATAAGGAGACTATAACTCTACAGATTGTGAATATATTTATT | |
| | TTCAAGTTGCATTCTTTGTCTTTTTAAGCAATCAGATTTCAAGAGAGCTCAAGCTTTCAGAAGTCAATGT | |
| | GAAAATTCCTTCCTAGGCTGTCCCACAGTCTTTGCTGCCCTTAGATGAAGCCACTTGTTTCAAGATGACT | |
| | ACTTTGGGGTTGGGTTTTCATCTAAACACATTTTTCCAGTCTTATTAGATAAATTAGTCCATATGGTTGG | |
| | TTAATCAAGAGCCTTCTGGGTTTGGTTTGGTGGCATTAAATGG | |
| CDCA1 | GCGGAATGGGGCGGGACTTCCAGTAGGAGGCGGCAAGTTTGAAAAGTGATGACGGTTGACGTTTGCTGAT | 223 |
| NM_031423 | TTTTGACTTTGCTTGTAGCTGCTCCCCGAACTCGCCGTCTTCCTGTCGGCGGCCGGCACTGTAGATTAAC | |
| | AGGAAACTTCCAAGATGGAAACTTTGTCTTTCCCCAGATATAATGTAGCTGAGATTGTGATTCATATTCG | |
| | CAATAAGATCTTAACAGGAGCTGATGGTAAAAACCTCACCAAGAATGATCTTTATCCAAATCCAAAGCCT | |
| | GAAGTCTTGCACATGATCTACATGAGAGCCTTACAAATAGTATATGGAATTCGACTGGAACATTTTTACA | |
| | TGATGCCAGTGAACTCTGAAGTCATGTATCCACATTTAATGGAAGGCTTCTTACCATTCAGCAATTTAGT | |
| | TACTCATCTGGACTCATTTTTGCCTATCTGCCGGGTGAATGACTTTGAGACTGCTGATATTCTATGTCCA | |
| | AAAGCAAAACGGACAAGTCGGTTTTTAAGTGGCATTATCAACTTTATTCACTTCAGAGAAGCATGCCGTG | |
| | AAACGTATATGGAATTTCTTTGGCAATATAAATCCTCTGCGGACAAAATGCAACAGTTAAACGCCGCACA | |
| | CCAGGAGGCATTAATGAAACTGGAGAGACTTGATTCTGTTCCAGTTGAAGAGCAAGAAGAGTTCAAGCAG | |
| | CTTTCAGATGGAATTCAGGAGCTACAACAATCACTAAATCAGGATTTTCATCAAAAAACGATAGTGCTGC | |
| | AAGAGGGAAATTCCCAAAAGAAGTCAAATATTTCAGAGAAAACCAAGCGTTTGAATGAACTAAAATTGTC | |
| | GGTGGTTTCTTTGAAAGAAATACAAGAGAGTTTGAAAACAAAAATTGTGGATTCTCCAGAGAAGTTAAAG | |
| | AATTATAAAGAAAAAATGAAAGATACGGTCCAGAAGCTTAAAAATGCCAGACAAGAAGTGGTGGAGAAAT | |
| | ATGAAATCTATGGAGACTCAGTTGACTGCCTGCCTTCATGTCAGTTGGAAGTGCAGTTATATCAAAAGAA | |
| | AATACAGGACCTTTCAGATAATAGGGAAAAATTAGCCAGTATCTTAAAGGAGAGCCTGAACTTGGAGGAC | |
| | CAAATTGAGAGTGATGAGTCAGAACTGAAGAAATTGAAGACTGAAGAAAATTCGTTCAAAAGACTGATGA | |
| | TTGTGAAGAAGGAAAAACTTGCCACAGCACAATTCAAAATAAATAAGAAGCATGAAGATGTTAAGCAATA | |
| | CAAACGCACAGTAATTGAGGATTGCAATAAAGTTCAAGAAAAAAGAGGTGCTGTCTATGAACGAGTAACC | |
| | ACAATTAATCAAGAAATCCAAAAAATTAAACTTGGAATTCAACAACTAAAAGATGCTGCTGAAAGGGAGA | |
| | AACTGAAGTCCCAGGAAATATTTCTAAACTTGAAAACTGCTTTGGAGAAATACCACGACGGTATTGAAAA | |
| | GGCAGCAGAGGACTCCTATGCTAAGATAGATGAGAAGACAGCTGAACTGAAGAGGAAGATGTTCAAAATG | |
| | TCAACCTGATTAACAAAATTACATGTCTTTTTGTAAATGGCTTGCCATCTTTTAATTTTCTATTTAGAAA | |
| | GAAAAGTTGAAGCGAATGGAAGTATCAGAAGTACCAAATAATGTTGGCTTCATCAGTTTTTATACACTCT | |
| | CATAAGTAGTTAATAAGATGAATTTAATGTAGGCTTTTATTAATTTATAATTAAAATAACTTGTGCAGCT | |
| | ATTCATGTCTCTACTCTGCCCCTTGTTGTAAATAGTTTGAGTAAAACAAAACTAGTTACCTTTGAAATAT | |
| | ATATATTTTTTTCTGTTACTATC | |
| CDH3 | GGCTAGCGCGGGAGGTGGAGAAAGAGGCTTGGGCGGCCCCGCTGTAGCCGCGTGTGGGAGGACGCACGGG | 224 |
| BC041846 | CCTGCTTCAAAGCTTTGGGATAACAGCGCCTCCGGGGGATAATGAATGCGGAGCCTCCGTTTTCAGTCGA | |
| | CTTCAGATGTGTCTCCACTTTTTTCCGCTGTAGCCGCAAGGCAAGGAAACATTTCTCTTCCCGTACTGAG | |
| | GAGGCTGAGGAGTGCACTGGGTGTTCTTTTCTCCTCTAACCCAGAACTGCGAGACAGAGGCTGAGTCCCT | |
| | GTAAAGAACAGCTCCAGAAAAGCCAGGAGAGCGCAGGAGGGCATCCGGGAGGCCAGGAGGGGTTCGCTGG | |
| | GGCCTCAACCGCACCCACATCGGTCCCACCTGCGAGGGGGCGGGACCTCGTGGCGCTGGACCAATCAGCA | |
| | CCCACCTGCGCTCACCTGGCCTCCTCCCGCTGGCTCCCGGGGGCTGCGGTGCTCAAAGGGGCAAGAGCTG | |
| | AGCGGAACACCGGCCCGCCGTCGCGGCAGCTGCTTCACCCCTCTCTCTGCAGCCATGGGGCTCCCTCGTG | |
| | GACCTCTCGCGTCTCTCCTCCTTCTCCAGGTTTGCTGGCTGCAGTGCGCGGCCTCCGAGCCGTGCCGGGC | |
| | GGTCTTCAGGGAGGCTGAAGTGACCTTGGAGGCGGGAGGCGCGGAGCAGGAGCCCGGCCAGGCGCTGGGG | |
| | AAAGTATTCATGGGCTGCCCTGGGCAAGAGCCAGCTCTGTTTAGCACTGATAATGATGACTTCACTGTGC | |
| | GGAATGGCGAGACAGTCCAGGAAAGAAGGTCACTGAAGGAAAGGAATCCATTGAAGATCTTCCCATCCAA | |
| | ACGTATCTTACGAAGACACAAGAGAGATTGGGTGGTTGCTCCAATATCTGTCCCTGAAAATGGCAAGGGT | |
| | CCCTTCCCCCAGAGACTGAATCAGCTCAAGTCTAATAAAGATAGAGACACCAAGATTTTCTACAGCATCA | |
| | CGGGGCCGGGGGCAGACAGCCCCCCTGAGGGTGTCTTCGCTGTAGAGAAGGAGACAGGCTGGTTGTTGTT | |
| | GAATAAGCCACTGGACCGGGAGGAGATTGCCAAGTATGAGCTCTTTGGCCACGCTGTGTCAGAGAATGGT | |
| | GCCTCAGTGGAGGACCCCATGAACATCTCCATCATAGTGACCGACCAGAATGACCACAAGCCCAAGTTTA | |
| | CCCAGGACACCTTCCGAGGGAGTGTCTTAGAGGGAGTCCTACCAGGTACTTCTGTGATGCAGATGACAGC | |
| | CACAGATGAGGATGATGCCATCTACACCTACAATGGGGTGGTTGCTTACTCCATCCATAGCCAAGAACCA | |
| | AAGGACCCACACGACCTCATGTTCACAATTCACCGGAGCACAGGCACCATCAGCGTCATCTCCAGTGGCC | |
| | TGGACCGGGAAAAAGTCCCTGAGTACACACTGACCATCCAGGCCACAGACATGGATGGGGACGGCTCCAC | |
| | CACCACGGCAGTGGCAGTAGTGGAGATCCTTGATGCCAATGACAATGCTCCCATGTTTGACCCCCAGAAG | |
| | TACGAGGCCCATGTGCCTGAGAATGCAGTGGGCCATGAGGTGCAGAGGCTGACGGTCACTGATCTGGACG | |
| | CCCCCAACTCACCAGCGTGGCGTGCCACCTACCTTATCATGGGCGGTGACGACGGGGACCATTTTACCAT | |
| | CACCACCCACCCTGAGAGCAACCAGGGCATCCTGACAACCAGGAAGGGTTTGGATTTTGAGGCCAAAAAC | |
| | CAGCACACCCTGTACGTTGAAGTGACCAACGAGGCCCCTTTTGTGCTGAAGCTCCCAACCTCCACAGCCA | |
| | CCATAGTGGTCCACGTGGAGGATGTGAATGAGGCACCTGTGTTTGTCCCACCCTCCAAAGTCGTTGAGGT | |
| | CCAGGAGGGCATCCCCACTGGGGAGCCTGTGTGTGTCTACACTGCAGAAGACCCTGACAAGGAGAATCAA | |
| | AAGATCAGCTACCGCATCCTGAGAGACCCAGCAGGGTGGCTAGCCATGGACCCAGACAGTGGGCAGGTCA | |
| | CAGCTGTGGGCACCCTCGACCGTGAGGATGAGCAGTTTGTGAGGAACAACATCTATGAAGTCATGGTCTT | |
| | GGCCATGGACAATGGAAGCCCTCCCACCACTGGCACGGGAACCCTTCTGCTAACACTGATTGATGTCAAC | |
| | GACCATGGCCCAGTCCCTGAGCCCCGTCAGATCACCATCTGCAACCAAAGCCCTGTGCGCCAGGTGCTGA | |
| | ACATCACGGACAAGGACCTGTCTCCCCACACCTCCCCTTTCCAGGCCCAGCTCACAGATGACTCAGACAT | |
| | CTACTGGACGGCAGAGGTCAACGAGGAAGGTGACACAGTGGTCTTGTCCCTGAAGAAGTTCCTGAAGCAG | |
| | GATACATATGACGTGCACCTTTCTCTGTCTGACCATGGCAACAAAGAGCAGCTGACGGTGATCAGGGCCA | |
| | CTGTGTGCGACTGCCATGGCCATGTCGAAACCTGCCCTGGACCCTGGAAAGGAGGTTTCATCCTCCCTGT | |
| | GCTGGGGGCTGTCCTGGCTCTGCTGTTCCTCCTGCTGGTGCTGCTTTTGTTGGTGAGAAAGAAGCGGAAG | |
| | ATCAAGGAGCCCCTCCTACTCCCAGAAGATGACACCCGTGACAACGTCTTCTACTATGGCGAAGAGGGGG | |
| | GTGGCGAAGAGGACCAGGACTATGACATCACCCAGCTCCACCGAGGTCTGGAGGCCAGGCCGGAGGTGGT | |
| | TCTCCGCAATGACGTGGCACCAACCATCATCCCGACACCCATGTACCGTCCTAGGCCAGCCAACCCAGAT | |
| | GAAATCGGCAACTTTATAATTGAGAACCTGAAGGCGGCTAACACAGACCCCACAGCCCCGCCCTACGACA | |
| | CCCTCTTGGTGTTCGACTATGAGGGCAGCGGCTCCGACGCCGCGTCCCTGAGCTCCCTCACCTCCTCCGC | |
| | CTCCGACCAAGACCAAGATTACGATTATCTGAACGAGTGGGGCAGCCGCTTCAAGAAGCTGGCAGACATG | |
| | TACGGTGGCGGGGAGGACGACTAGGCGGCCTGCCTGCAGGGCTGGGGACCAAACGTCAGGCCACAGAGCA | |
| | TCTCCAAGGGGTCTCAGTTCCCCCTTCAGCTGAGGACTTCGGAGCTTGTCAGGAAGTGGCCGTAGCAACT | |
| | TGGCGGAGACAGGCTATGAGTCTGACGTTAGAGTGGTTGCTTCCTTAGCCTTTCAGGATGGAGGAATGTG | |
| | GGCAGTTTGACTTCAGCACTGAAAACCTCTCCACCTGGGCCAGGGTTGCCTCAGAGGCCAAGTTTCCAGA | |
| | AGCCTCTTACCTGCCGTAAAATGCTCAACCCTGTGTCCTGGGCCTGGGCCTGCTGTGACTGACCTACAGT | |
| | GGACTTTCTCTCTGGAATGGAACCTTCTTAGGCCTCCTGGTGCAACTTAATTTTTTTTTTTAATGCTATC | |
| | TTCAAAACGTTAGAGAAAGTTCTTCAAAAGTGCAGCCCAGAGCTGCTGGGCCCACTGGCCGTCCTGCATT | |
| | TCTGGTTTCCAGACCCCAATGCCTCCCATTCGGATGGATCTCTGCGTTTTTATACTGAGTGTGCCTAGGT | |
| | TGCCCCTTATTTTTTATTTTCCCTGTTGCGTTGCTATAGATGAAGGGTGAGGACAATCGTGTATATGTAC | |
| | TAGAACTTTTTTATTAAAGAAACTTTTCCCAAAAAAAAAAAAAAAA | |
| CENPF | GAGACCAGAAGCGGGCGAATTGGGCACCGGTGGCGGCTGCGGGCAGTTTGAATTAGACTCTGGGCTCCAG | 225 |
| NM_016343 | CCCGCCGAAGCCGCGCCAGAACTGTACTCTCCGAGAGGTCGTTTTCCCGTCCCCGAGAGCAAGTTTATTT | |
| | ACAAATGTTGGAGTAATAAAGAAGGCAGAACAAAATGAGCTGGGCTTTGGAAGAATGGAAAGAAGGGCTG | |
| | CCTACAAGAGCTCTTCAGAAAATTCAAGAGCTTGAAGGACAGCTTGACAAACTGAAGAAGGAAAAGCAGC | |
| | AAAGGCAGTTTCAGCTTGACAGTCTCGAGGCTGCGCTGCAGAAGCAAAAACAGAAGGTTGAAAATGAAAA | |
| | AACCGAGGGTACAAACCTGAAAAGGGAGAATCAAAGATTGATGGAAATATGTGAAAGTCTGGAGAAAACT | |
| | AAGCAGAAGATTTCTCATGAACTTCAAGTCAAGGAGTCACAAGTGAATTTCCAGGAAGGACAACTGAATT | |
| | CAGGCAAAAAACAAATAGAAAAACTGGAACAGGAACTTAAAAGGTGTAAATCTGAGCTTGAAAGAAGCCA | |
| | ACAAGCTGCGCAGTCTGCAGATGTCTCTCTGAATCCATGCAATACACCACAAAAAATTTTTACAACTCCA | |
| | CTAACACCAAGTCAATATTATAGTGGTTCCAAGTATGAAGATCTAAAAGAAAAATATAATAAAGAGGTTG | |
| | AAGAACGAAAAAGATTAGAGGCAGAGGTTAAAGCCTTGCAGGCTAAAAAAGCAAGCCAGACTCTTCCACA | |
| | AGCCACCATGAATCACCGCGACATTGCCCGGCATCAGGCTTCATCATCTGTGTTCTCATGGCAGCAAGAG | |
| | AAGACCCCAAGTCATCTTTCATCTAATTCTCAAAGAACTCCAATTAGGAGAGATTTCTCTGCATCTTACT | |
| | TTTCTGGGGAACAAGAGGTGACTCCAAGTCGATCAACTTTGCAAATAGGGAAAAGAGATGCTAATAGCAG | |
| | TTTCTTTGACAATTCTAGCAGTCCTCATCTTTTGGATCAATTAAAAGCGCAGAATCAAGAGCTAAGAAAC | |
| | AAGATTAATGAGTTGGAACTACGCCTGCAAGGACATGAAAAAGAAATGAAAGGCCAAGTGAATAAGTTTC | |
| | AAGAACTCCAACTCCAACTGGAGAAAGCAAAAGTGGAATTAATTGAAAAAGAGAAAGTTTTGAACAAATG | |
| | TAGGGATGAACTAGTGAGAACAACAGCACAATACGACCAGGCGTCAACCAAGTATACTGCATTGGAACAA | |
| | AAACTGAAAAAATTGACGGAAGATTTGAGTTGTCAGCGACAAAATGCAGAAAGTGCCAGATGTTCTCTGG | |
| | AACAGAAAATTAAGGAAAAAGAAAAGGAGTTTCAAGAGGAGCTCTCCCGTCAACAGCGTTCTTTCCAAAC | |
| | ACTGGACCAGGAGTGCATCCAGATGAAGGCCAGACTCACCCAGGAGTTACAGCAAGCCAAGAATATGCAC | |
| | AACGTCCTGCAGGCTGAACTGGATAAACTCACATCAGTAAAGCAACAGCTAGAAAACAATTTGGAAGAGT | |
| | TTAAGCAAAAGTTGTGCAGAGCTGAACAGGCGTTCCAGGCGAGTCAGATCAAGGAGAATGAGCTGAGGAG | |
| | AAGCATGGAGGAAATGAAGAAGGAAAACAACCTCCTTAAGAGTCACTCTGAGCAAAAGGCCAGAGAAGTC | |
| | TGCCACCTGGAGGCAGAACTCAAGAACATCAAACAGTGTTTAAATCAGAGCCAGAATTTTGCAGAAGAAA | |
| | TGAAAGCGAAGAATACCTCTCAGGAAACCATGTTAAGAGATCTTCAAGAAAAAATAAATCAGCAAGAAAA | |
| | CTCCTTGACTTTAGAAAAACTGAAGCTTGCTGTGGCTGATCTGGAAAAGCAGCGAGATTGTTCTCAAGAC | |
| | CTTTTGAAGAAAAGAGAACATCACATTGAACAACTTAATGATAAGTTAAGCAAGACAGAGAAAGAGTCCA | |
| | AAGCCTTGCTGAGTGCTTTAGAGTTAAAAAAGAAAGAATATGAAGAATTGAAAGAAGAGAAAACTCTGTT | |
| | TTCTTGTTGGAAAAGTGAAAACGAAAAACTTTTAACTCAGATGGAATCAGAAAAGGAAAACTTGCAGAGT | |
| | AAAATTAATCACTTGGAAACTTGTCTGAAGACACAGCAAATAAAAAGTCATGAATACAACGAGAGAGTAA | |
| | GAACGCTGGAGATGGACAGAGAAAACCTAAGTGTCGAGATCAGAAACCTTCACAACGTGTTAGACAGTAA | |
| | GTCAGTGGAGGTAGAGACCCAGAAACTAGCTTATATGGAGCTACAGCAGAAAGCTGAGTTCTCAGATCAG | |
| | AAACATCAGAAGGAAATAGAAAATATGTGTTTGAAGACTTCTCAGCTTACTGGGCAAGTTGAAGATCTAG | |
| | AACACAAGCTTCAGTTACTGTCAAATGAAATAATGGACAAAGACCGGTGTTACCAAGACTTGCATGCCGA | |
| | ATATGAGAGCCTCAGGGATCTGCTAAAATCCAAAGATGCTTCTCTGGTGACAAATGAAGATCATCAGAGA | |
| | AGTCTTTTGGCTTTTGATCAGCAGCCTGCCATGCATCATTCCTTTGCAAATATAATTGGAGAACAAGGAA | |
| | GCATGCCTTCAGAGAGGAGTGAATGTCGTTTAGAAGCAGACCAAAGTCCGAAAAATTCTGCCATCCTACA | |
| | AAATAGAGTTGATTCACTTGAATTTTCATTAGAGTCTCAAAAACAGATGAACTCAGACCTGCAAAAGCAG | |
| | TGTGAAGAGTTGGTGCAAATCAAAGGAGAAATAGAAGAAAATCTCATGAAAGCAGAACAGATGCATCAAA | |
| | GTTTTGTGGCTGAAACAAGTCAGCGCATTAGTAAGTTACAGGAAGACACTTCTGCTCACCAGAATGTTGT | |
| | TGCTGAAACCTTAAGTGCCCTTGAGAACAAGGAAAAAGAGCTGCAACTTTTAAATGATAAGGTAGAAACT | |
| | GAGCAGGCAGAGATTCAAGAATTAAAAAAGAGCAACCATCTACTTGAAGACTCTCTAAAGGAGCTACAAC | |
| | TTTTATCCGAAACCCTAAGCTTGGAGAAGAAAGAAATGAGTTCCATCATTTCTCTAAATAAAAGGGAAAT | |
| | TGAAGAGCTGACCCAAGAGAATGGGACTCTTAAGGAAATTAATGCATCCTTAAATCAAGAGAAGATGAAC | |
| | TTAATCCAGAAAAGTGAGAGTTTTGCAAACTATATAGATGAAAGGGAGAAAAGCATTTCAGAGTTATCTG | |
| | ATCAGTACAAGCAAGAAAAACTTATTTTACTACAAAGATGTGAAGAAACCGGAAATGCATATGAGGATCT | |
| | TAGTCAAAAATACAAAGCAGCACAGGAAAAGAATTCTAAATTAGAATGCTTGCTAAATGAATGCACTAGT | |
| | CTTTGTGAAAATAGGAAAAATGAGTTGGAACAGCTAAAGGAAGCATTTGCAAAGGAACACCAAGAATTCT | |
| | TAACAAAATTAGCATTTGCTGAAGAAAGAAATCAGAATCTGATGCTAGAGTTGGAGACAGTGCAGCAAGC | |
| | TCTGAGATCTGAGATGACAGATAACCAAAACAATTCTAAGAGCGAGGCTGGTGGTTTAAAGCAAGAAATC | |
| | ATGACTTTAAAGGAAGAACAAAACAAAATGCAAAAGGAAGTTAATGACTTATTACAAGAGAATGAACAGC | |
| | TGATGAAGGTAATGAAGACTAAACATGAATGTCAAAATCTAGAATCAGAACCAATTAGGAACTCTGTGAA | |
| | AGAAAGAGAGAGTGAGAGAAATCAATGTAATTTTAAACCTCAGATGGATCTTGAAGTTAAAGAAATTTCT | |
| | CTAGATAGTTATAATGCGCAGTTGGTGCAATTAGAAGCTATGCTAAGAAATAAGGAATTAAAACTTCAGG | |
| | AAAGTGAGAAGGAGAAGGAGTGCCTGCAGCATGAATTACAGACAATTAGAGGAGATCTTGAAACCAGCAA | |
| | TTTGCAAGACATGCAGTCACAAGAAATTAGTGGCCTTAAAGACTGTGAAATAGATGCGGAAGAAAAGTAT | |
| | ATTTCAGGGCCTCATGAGTTGTCAACAAGTCAAAACGACAATGCACACCTTCAGTGCTCTCTGCAAACAA | |
| | CAATGAACAAGCTGAATGAGCTAGAGAAAATATGTGAAATACTGCAGGCTGAAAAGTATGAACTCGTAAC | |
| | TGAGCTGAATGATTCAAGGTCAGAATGTATCACAGCAACTAGGAAAATGGCAGAAGAGGTAGGGAAACTA | |
| | CTAAATGAAGTTAAAATATTAAATGATGACAGTGGTCTTCTCCATGGTGAGTTAGTGGAAGACATACCAG | |
| | GAGGTGAATTTGGTGAACAACCAAATGAACAGCACCCTGTGTCTTTGGCTCCATTGGACGAGAGTAATTC | |
| | CTACGAGCACTTGACATTGTCAGACAAAGAAGTTCAAATGCACTTTGCCGAATTGCAAGAGAAATTCTTA | |
| | TCTTTACAAAGTGAACACAAAATTTTACATGATCAGCACTGTCAGATGAGCTCTAAAATGTCAGAGCTGC | |
| | AGACCTATGTTGACTCATTAAAGGCCGAAAATTTGGTCTTGTCAACGAATCTGAGAAACTTTCAAGGTGA | |
| | CTTGGTGAAGGAGATGCAGCTGGGCTTGGAGGAGGGGCTCGTTCCATCCCTGTCATCCTCTTGTGTGCCT | |
| | GACAGCTCTAGTCTTAGCAGTTTGGGAGACTCCTCCTTTTACAGAGCTCTTTTAGAACAGACAGGAGATA | |
| | TGTCTCTTTTGAGTAATTTAGAAGGGGCTGTTTCAGCAAACCAGTGCAGTGTAGATGAAGTATTTTGCAG | |
| | CAGTCTGCAGGAGGAGAATCTGACCAGGAAAGAAACCCCTTCGGCCCCAGCGAAGGGTGTTGAAGAGCTT | |
| | GAGTCCCTCTGTGAGGTGTACCGGCAGTCCCTCGAGAAGCTAGAAGAGAAAATGGAAAGTCAAGGGATTA | |
| | TGAAAAATAAGGAAATTCAAGAGCTCGAGCAGTTATTAAGTTCTGAAAGGCAAGAGCTTGACTGCCTTAG | |
| | GAAGCAGTATTTGTCAGAAAATGAACAGTGGCAACAGAAGCTGACAAGCGTGACTCTGGAGATGGAGTCC | |
| | AAGTTGGCGGCAGAAAAGAAACAGACGGAACAACTGTCACTTGAGCTGGAAGTAGCACGACTCCAGCTAC | |
| | AAGGTCTGGACTTAAGTTCTCGGTCTTTGCTTGGCATCGACACAGAAGATGCTATTCAAGGCCGAAATGA | |
| | GAGCTGTGACATATCAAAAGAACATACTTCAGAAACTACAGAAAGAACACCAAAGCATGATGTTCATCAG | |
| | ATTTGTGATAAAGATGCTCAGCAGGACCTCAATCTAGACATTGAGAAAATAACTGAGACTGGTGCAGTGA | |
| | AACCCACAGGAGAGTGCTCTGGGGAACAGTCCCCAGATACCAATTATGAGCCTCCAGGGGAAGATAAAAC | |
| | CCAGGGCTCTTCAGAATGCATTTCTGAATTGTCATTTTCTGGTCCTAATGCTTTGGTACCTATGGATTTC | |
| | CTGGGGAATCAGGAAGATATCCATAATCTTCAACTGCGGGTAAAAGAGACATCAAATGAGAATTTGAGAT | |
| | TACTTCATGTGATAGAGGACCGTGACAGAAAAGTTGAAAGTTTGCTAAATGAAATGAAAGAATTAGACTC | |
| | AAAACTCCATTTACAGGAGGTACAACTAATGACCAAAATTGAAGCATGCATAGAATTGGAAAAAATAGTT | |
| | GGGGAACTTAAGAAAGAAAACTCAGATTTAAGTGAAAAATTGGAATATTTTTCTTGTGATCACCAGGAGT | |
| | TACTCCAGAGAGTAGAAACTTCTGAAGGCCTCAATTCTGATTTAGAAATGCATGCAGATAAATCATCACG | |
| | TGAAGATATTGGAGATAATGTGGCCAAGGTGAATGACAGCTGGAAGGAGAGATTTCTTGATGTGGAAAAT | |
| | GAGCTGAGTAGGATCAGATCGGAGAAAGCTAGCATTGAGCATGAAGCCCTCTACCTGGAGGCTGACTTAG | |
| | AGGTAGTTCAAACAGAGAAGCTATGTTTAGAAAAAGACAATGAAAATAAGCAGAAGGTTATTGTCTGCCT | |
| | TGAAGAAGAACTCTCAGTGGTCACAAGTGAGAGAAACCAGCTTCGTGGAGAATTAGATACTATGTCAAAA | |
| | AAAACCACGGCACTGGATCAGTTGTCTGAAAAAATGAAGGAGAAAACACAAGAGCTTGAGTCTCATCAAA | |
| | GTGAGTGTCTCCATTGCATTCAGGTGGCAGAGGCAGAGGTGAAGGAAAAGACGGAACTCCTTCAGACTTT | |
| | GTCCTCTGATGTGAGTGAGCTGTTAAAAGACAAAACTCATCTCCAGGAAAAGCTGCAGAGTTTGGAAAAG | |
| | GACTCACAGGCACTGTCTTTGACAAAATGTGAGCTGGAAAACCAAATTGCACAACTGAATAAAGAGAAAG | |
| | AATTGCTTGTCAAGGAATCTGAAAGCCTGCAGGCCAGACTGAGTGAATCAGATTATGAAAAGCTGAATGT | |
| | CTCCAAGGCCTTGGAGGCCGCACTGGTGGAGAAAGGTGAGTTCGCATTGAGGCTGAGCTCAACACAGGAG | |
| | GAAGTGCATCAGCTGAGAAGAGGCATCGAGAAACTGAGAGTTCGCATTGAGGCCGATGAAAAGAAGCAGC | |
| | TGCACATCGCAGAGAAACTGAAAGAACGCGAGCGGGAGAATGATTCACTTAAGGATAAAGTTGAGAACCT | |
| | TGAAAGGGAATTGCAGATGTCAGAAGAAAACCAGGAGCTAGTGATTCTTGATGCCGAGAATTCCAAAGCA | |
| | GAAGTAGAGACTCTAAAAACACAAATAGAAGAGATGGCCAGAAGCCTGAAAGTTTTTGAATTAGACCTTG | |
| | TCACGTTAAGGTCTGAAAAAGAAAATCTGACAAAACAAATACAAGAAAAACAAGGTCAGTTGTCAGAACT | |
| | AGACAAGTTACTCTCTTCATTTAAAAGTCTGTTAGAAGAAAAGGAGCAAGCAGAGATACAGATCAAAGAA | |
| | GAATCTAAAACTGCAGTGGAGATGCTTCAGAATCAGTTAAAGGAGCTAAATGAGGCAGTAGCAGCCTTGT | |
| | GTGGTGACCAAGAAATTATGAAGGCCACAGAACAGAGTCTAGACCCACCAATAGAGGAAGAGCATCAGCT | |
| | GAGAAATAGCATTGAAAAGCTGAGAGCCCGCCTAGAAGCTGATGAAAAGAAGCAGCTCTGTGTCTTACAA | |
| | CAACTGAAGGAAAGTGAGCATCATGCAGATTTACTTAAGGGTAGAGTGGAGAACCTTGAAAGAGAGCTAG | |
| | AGATAGCCAGGACAAACCAAGAGCATGCAGCTCTTGAGGCAGAGAATTCCAAAGGAGAGGTAGAGACCCT | |
| | AAAAGCAAAAATAGAAGGGATGACCCAAAGTCTGAGAGGTCTGGAATTAGATGTTGTTACTATAAGGTCA | |
| | GAAAAAGAAAATCTGACAAATGAATTACAAAAAGAGCAAGAGCGAATATCTGAATTAGAAATAATAAATT | |
| | CATCATTTGAAAATATTTTGCAAGAAAAAGAGCAAGAGAAAGTACAGATGAAAGAAAAATCAAGCACTGC | |
| | CATGGAGATGCTTCAAACACAATTAAAAGAGCTCAATGAGAGAGTGGCAGCCCTGCATAATGACCAAGAA | |
| | GCCTGTAAGGCCAAAGAGCAGAATCTTAGTAGTCAAGTAGAGTGTCTTGAACTTGAGAAGGCTCAGTTGC | |
| | TACAAGGCCTTGATGAGGCCAAAAATAATTATATTGTTTTGCAATCTTCAGTGAATGGCCTCATTCAAGA | |
| | AGTAGAAGATGGCAAGCAGAAACTGGAGAAGAAGGATGAAGAAATCAGTAGACTGAAAAATCAAATTCAA | |
| | GACCAAGAGCAGCTTGTCTCTAAACTGTCCCAGGTGGAAGGAGAGCACCAACTTTGGAAGGAGCAAAACT | |
| | TAGAACTGAGAAATCTGACAGTGGAATTGGAGCAGAAGATCCAAGTGCTACAATCCAAAAATGCCTCTTT | |
| | GCAGGACACATTAGAAGTGCTGCAGAGTTCTTACAAGAATCTAGAGAATGAGCTTGAATTGACAAAAATG | |
| | GACAAAATGTCCTTTGTTGAAAAAGTAAACAAAATGACTGCAAAGGAAACTGAGCTGCAGAGGGAAATGC | |
| | ATGAGATGGCACAGAAAACAGCAGAGCTGCAAGAAGAACTCAGTGGAGAGAAAAATAGGCTAGCTGGAGA | |
| | GTTGCAGTTACTGTTGGAAGAAATAAAGAGCAGCAAAGATCAATTGAAGGAGCTCACACTAGAAAATAGT | |
| | GAATTGAAGAAGAGCCTAGATTGCATGCACAAAGACCAGGTGGAAAAGGAAGGGAAAGTGAGAGAGGAAA | |
| | TAGCTGAATATCAGCTACGGCTTCATGAAGCTGAAAAGAAACACCAGGCTTTGCTTTTGGACACAAACAA | |
| | ACAGTATGAAGTAGAAATCCAGACATACCGAGAGAAATTGACTTCTAAAGAAGAATGTCTCAGTTCACAG | |
| | AAGCTGGAGATAGACCTTTTAAAGTCTAGTAAAGAAGAGCTCAATAATTCATTGAAAGCTACTACTCAGA | |
| | TTTTGGAAGAATTGAAGAAAACCAAGATGGACAATCTAAAATATGTAAATCAGTTGAAGAAGGAAAATGA | |
| | ACGTGCCCAGGGGAAAATGAAGTTGTTGATCAAATCCTGTAAACAGCTGGAAGAGGAAAAGGAGATACTG | |
| | CAGAAAGAACTCTCTCAACTTCAAGCTGCACAGGAGAAGCAGAAAACAGGTACTGTTATGGATACCAAGG | |
| | TCGATGAATTAACAACTGAGATCAAAGAACTGAAAGAAACTCTTGAAGAAAAAACCAAGGAGGCAGATGA | |
| | ATACTTGGATAAGTACTGTTCCTTGCTTATAAGCCATGAAAAGTTAGAGAAAGCTAAAGAGATGTTAGAG | |
| | ACACAAGTGGCCCATCTGTGTTCACAGCAATCTAAACAAGATTCCCGAGGGTCTCCTTTGCTAGGTCCAG | |
| | TTGTTCCAGGACCATCTCCAATCCCTTCTGTTACTGAAAAGAGGTTATCATCTGGCCAAAATAAAGCTTC | |
| | AGGCAAGAGGCAAAGATCCAGTGGAATATGGGAGAATGGTAGAGGACCAACACCTGCTACCCCAGAGAGC | |
| | TTTTCTAAAAAAAGCAAGAAAGCAGTCATGAGTGGTATTCACCCTGCAGAAGACACGGAAGGTACTGAGT | |
| | TTGAGCCAGAGGGACTTCCAGAAGTTGTAAAGAAAGGGTTTGCTGACATCCCGACAGGAAAGACTAGCCC | |
| | ATATATCCTGCGAAGAACAACCATGGCAACTCGGACCAGCCCCCGCCTGGCTGCACAGAAGTTAGCGCTA | |
| | TCCCCACTGAGTCTCGGCAAAGAAAATCTTGCAGAGTCCTCCAAACCAACAGCTGGTGGCAGCAGATCAC | |
| | AAAAGGTCAAAGTTGCTCAGCGGAGCCCAGTAGATTCAGGCACCATCCTCCGAGAACCCACCACGAAATC | |
| | CGTCCCAGTCAATAATCTTCCTGAGAGAAGTCCGACTGACAGCCCCAGAGAGGGCCTGAGGGTCAAGCGA | |
| | GGCCGACTTGTCCCCAGCCCCAAAGCTGGACTGGAGTCCAACGGCAGTGAGAACTGTAAGGTCCAGTGAA | |
| | GGCACTTTGTGTGTCAGTACCCCTGGGAGGTGCCAGTCATTGAATAGATAAGGCTGTGCCTACAGGACTT | |
| | CTCTTTAGTCAGGGCATGCTTTATTAGTGAGGAGAAAACAATTCCTTAGAAGTCTTAAATATATTGTACT | |
| | CTTTAGATCTCCCATGTGTAGGTATTGAAAAAGTTTGGAAGCACTGATCACCTGTTAGCATTGCCATTCC | |
| | TCTACTGCAATGTAAATAGTATAAAGCTATGTATATAAAGCTTTTTGGTAATATGTTACAATTAAAATGA | |
| | CAAGCACTATATCACAATCTCTGTTTGTATGTGGGTTTTACACTAAAAAAATGCAAAACACATTTTATTC | |
| | TTCTAATTAACAGCTCCTAGGAAAATGTAGACTTTTGCTTTATGATATTCTATCTGTAGTATGAGGCATG | |
| | GAATAGTTTTGTATCGGGAATTTCTCAGAGCTGAGTAAAATGAAGGAAAAGCATGTTATGTGTTTTTAAG | |
| | GAAAATGTGCACACATATACATGTAGGAGTGTTTATCTTTCTCTTACAATCTGTTTTAGACATCTTTGCT | |
| | TATGAAACCTGTACATATGTGTGTGTGGGTATGTGTTTATTTCCAGTGAGGGCTGCAGGCTTCCTAGAGG | |
| | TGTGCTATACCATGCGTCTGTCGTTGTGCTTTTTTCTGTTTTTAGACCAATTTTTTACAGTTCTTTGGTA | |
| | AGCATTGTCGTATCTGGTGATGGATTAACATATAGCCTTTGTTTTCTAATAAAATAGTCGCCTTCGTTTT | |
| | CTGTAAAAAAAAAAAAAAAAAAAAAA | |
| CEP55 | GGCACGAGGGGCCGACGCGAGCGCCGCGCTTCGCTTCAGCTGCTAGCTGGCCCAAGGGAGGCGACCGCGG | 226 |
| AB091343 | AGGGTGGCGAGGGGCGGCCAGGACCCGCAGCCCCGGGGCCGGGCCGGTCCGGACCGCCAGGGAGGGCAGG | |
| | TCAGTGGGCAGATCGCGTCCGCGGGATTCAATCTCTGCCCGCTCTGATAACAGTCCTTTTCCCTGGCGCT | |
| | CACTTCGTGCCTGGCACCCGGCTGGGCGCCTCAAGACCGTTGTCTCTTCGATCGCTTCTTTGGACTTGGC | |
| | GACCATTTCAGAGATGTCTTCCAGAAGTACCAAAGATTTAATTAAAAGTAAGTGGGGATCGAAGCCTAGT | |
| | AACTCCAAATCCGAAACTACATTAGAAAAATTAAAGGGAGAAATTGCACACTTAAAGACATCAGTGGATG | |
| | AAATCACAAGTGGGAAAGGAAAGCTGACTGATAAAGAGAGACACAGACTTTTGGAGAAAATTCGAGTCCT | |
| | TGAGGCTGAGAAGGAGAAGAATGCTTATCAACTCACAGAGAAGGACAAAGAAATACAGCGACTGAGAGAC | |
| | CAACTGAAGGCCAGATATAGTACTACCGCATTGCTTGAACAGCTGGAAGAGACAACGAGAGAAGGAGAAA | |
| | GGAGGGAGCAGGTGTTGAAAGCCTTATCTGAAGAGAAAGACGTATTGAAACAACAGTTGTCTGCTGCAAC | |
| | CTCACGAATTGCTGAACTTGAAAGCAAAACCAATACACTCCGTTTATCACAGACTGTGGCTCCAAACTGC | |
| | TTCAACTCATCAATAAATAATATTCATGAAATGGAAATACAGCTGAAAGATGCTCTGGAGAAAAATCAGC | |
| | AGTGGCTCGTGTATGATCAGCAGCGGGAAGTCTATGTAAAAGGACTTTTAGCAAAGATCTTTGAGTTGGA | |
| | AAAGAAAACGGAAACAGCTGCTCATTCACTCCCACAGCAGACAAAAAAGCCTGAATCAGAAGGTTATCTT | |
| | CAAGAAGAGAAGCAGAAATGTTACAACGATCTCTTGGCAAGTGCAAAAAAAGATCTTGAGGTTGAACGAC | |
| | AAACCATAACTCAGCTGAGTTTTGAACTGAGTGAATTTCGAAGAAAATATGAAGAAACCCAAAAAGAAGT | |
| | TCACAATTTAAATCAGCTGTTGTATTCACAAAGAAGGGCAGATGTGCAACATCTGGAAGATGATAGGCAT | |
| | AAAACAGAGAAGATACAAAAACTCAGGGAAGAGAATGATATTGCTAGGGGAAAACTTGAAGAAGAGAAGA | |
| | AGAGATCCGAAGAGCTCTTATCTCAGGTCCAGTTTCTTTACACATCTCTGCTAAAGCAGCAAGAAGAACA | |
| | AACAAGGGTAGCTCTGTTGGAACAACAGATGCAGGCATGTACTTTAGACTTTGAAAATGAAAAACTCGAC | |
| | CGTCAACATGTGCAGCATCAATTGCATGTAATTCTTAAGGAGCTCCGAAAAGCAAGAAATCAAATAACAC | |
| | AGTTGGAATCCTTGAAACAGCTTCATGAGTTTGCCATCACAGAGCCATTAGTCACTTTCCAAGGAGAGAC | |
| | TGAAAACAGAGAAAAAGTTGCCGCCTCACCAAAAAGTCCCACTGCTGCACTCAATGAAAGCCTGGTGGAA | |
| | TGTCCCAAGTGCAATATACAGTATCCAGCCACTGAGCATCGCGATCTGCTTGTCCATGTGGAATACTGTT | |
| | CAAAGTAGCAAAATAAGTATTTGTTTTGATATTAAAAGATTCAATACTGTATTTTCTGTTAGCTTGTGGG | |
| | CATTTTGAATTATATATTTCACATTTTGCATAAAACTGCCTATCTACCTTTGACACTCCAGCATGCTAGT | |
| | GAATCATGTATCTTTTAGGCTGCTGTGCATTTCTCTTGGCAGTGATACCTCCCTGACATGGTTCATCATC | |
| | AGGCTGCAATGACAGAATGTGGTGAGCAGCGTCTACTGAGACTACTAACATTTTGCACTGTCAAAATACT | |
| | TGGTGAGGAAAAGATAGCTCAGGTTATTGCTAATGGGTTAATGCACCAGCAAGCAAAATATTTTATGTTT | |
| | TGGGGGTTTGAAAAATCAAAGATAATTAACCAAGGATCTTAACTGTGTTCGCATTTTTTATCCAAGCACT | |
| | TAGAAAACCTACAATCCTAATTTTGATGTCCATTGTTAAGAGGTGGTGATAGATACTATTTTTTTTTTCA | |
| | TATTGTATAGCGGTTATTAGAAAAGTTGGGGATTTTCTTGATCTTTATTGCTGCTTACCATTGAAACTTA | |
| | ACCCAGCTGTGTTCCCCAACTCTGTTCTGCGCACGAAACAGTATCTGTTTGAGGCATAATCTTAAGTGGC | |
| | CACACACAATGTTTTCTCTTATGTTATCTGGCAGTAACTGTAACTTGAATTACATTAGCACATTCTGCTT | |
| | AGCTAAAATTGTTAAAATAAACTTTAATAAACCCATGTAGCCCTCTCATTTGATTGACAGTATTTTAGTT | |
| | ATTTTTGGCATTCTTAAAGCTGGGCAATGTAATGATCAGATCTTTGTTTGTCTGAACAGGTATTTTTATA | |
| | CATGCTTTTTGTAAACCAAAAACTTTTAAATTTCTTCAGGTTTTCTAACATGCTTACCACTGGGCTACTG | |
| | TAAATGAGAAAAGAATAAAATTATTTAATGTTTTAAAAAAAAAAAAAAA | |
| CXXC5 | GGCGGCTGAGCCTGAGCGGGGATGTAGAGGCGGCGGCAGCAGAGGCGGCACTGGCGGCAAGAGCAGACGC | 227 |
| BC006428 | CCGAGCCGAGCGAGAAGAGCGGCAGAGCCTTATCCCCTGAAGCCGGGCCCCGCGTCCCAGCCCTGCCCAG | |
| | CCCGCGCCCAGCCATGCGCGCCGCCTGCTGAGTCCGGGCGCCGCACGCTGAGCCCTCCGCCCGCGAGCCG | |
| | CGCTCAGCTCGGGGGTGATTAGTTGCTTTTTGTTGTTTTTTAATTTGGGCCGCGGGGAGGGGGAGGAGGG | |
| | GCAGGTGCTGCAGGCTCCCCCCCCTCCCCGCCTCGGGCCAGCCGCGGCGGCGCGACTCGGGCTCCGGACC | |
| | CGGGCACTGCTGGCGGCTGGAGCGGAGCGCACCGCGGCGGTGGTGCCCAGAGCGGAGCGCAGCTCCCTGC | |
| | CCCGCCCCTCCCCCTCGGCCTCGCGGCGACGGCGGCGGTGGCGGCTTGGACGACTCGGAGAGCCGAGTGA | |
| | AGACATTTCCACCTGGACACCTGACCATGTGCCTGCCCTGAGCAGCGAGGCCCACCAGGCATCTCTGTTG | |
| | TGGGCAGCAGGGCCAGGTCCTGGTCTGTGGACCCTCGGCAGTTGGCAGGCTCCCTCTGCAGTGGGGTCTG | |
| | GGCCTCGGCCCCACCATGTCGAGCCTCGGCGGTGGCTCCCAGGATGCCGGCGGCAGTAGCAGCAGCAGCA | |
| | CCAATGGCAGCGGTGGCAGTGGCAGCAGTGGCCCAAAGGCAGGAGCAGCAGACAAGAGTGCAGTGGTGGC | |
| | TGCCGCCGCACCAGCCTCAGTGGCAGATGACACACCACCCCCCGAGCGTCGGAACAAGAGCGGTATCATC | |
| | AGTGAGCCCCTCAACAAGAGCCTGCGCCGCTCCCGCCCGCTCTCCCACTACTCTTCTTTTGGCAGCAGTG | |
| | GTGGTAGTGGCGGTGGCAGCATGATGGGCGGAGAGTCTGCTGACAAGGCCACTGCGGCTGCAGCCGCTGC | |
| | CTCCCTGTTGGCCAATGGGCATGACCTGGCGGCGGCCATGGCGGTGGACAAAAGCAACCCTACCTCAAAG | |
| | CACAAAAGTGGTGCTGTGGCCAGCCTGCTGAGCAAGGCAGAGCGGGCCACGGAGCTGGCAGCCGAGGGAC | |
| | AGCTGACGCTGCAGCAGTTTGCGCAGTCCACAGAGATGCTGAAGCGCGTGGTGCAGGAGCATCTCCCGCT | |
| | GATGAGCGAGGCGGGTGCTGGCCTGCCTGACATGGAGGCTGTGGCAGGTGCCGAAGCCCTCAATGGCCAG | |
| | TCCGACTTCCCCTACCTGGGCGCTTTCCCCATCAACCCAGGCCTCTTCATTATGACCCCGGCAGGTGTGT | |
| | TCCTGGCCGAGAGCGCGCTGCACATGGCGGGCCTGGCTGAGTACCCCATGCAGGGAGAGCTGGCCTCTGC | |
| | CATCAGCTCCGGCAAGAAGAAGCGGAAACGCTGCGGCATGTGCGCGCCCTGCCGGCGGCGCATCAACTGC | |
| | GAGCAGTGCAGCAGTTGTAGGAATCGAAAGACTGGCCATCAGATTTGCAAATTCAGAAAATGTGAGGAAC | |
| | TCAAAAAGAAGCCTTCCGCTGCTCTGGAGAAGGTGATGCTTCCGACGGGAGCCGCCTTCCGGTGGTTTCA | |
| | GTGACGGCGGCGGAACCCAAAGCTGCCCTCTCCGTGCAATGTCACTGCTCGTGTGGTCTCCAGCAAGGGA | |
| | TTCGGGCGAAGACAAACGGATGCACCCGTCTTTAGAACCAAAAATATTCTCTCACAGATTTCATTCCTGT | |
| | TTTTATATATATATTTTTTGTTGTCGTTTTAACATCTCCACGTCCCTAGCATAAAAAGAAAAAGAAAAAA | |
| | ATTTAAACTGCTTTTTCGGAAGAACAACAACAAAAAAGAGGTAAAGACGAATCTATAAAGTACCGAGACT | |
| | TCCTGGGCAAAGAATGGACAATCAGTTTCCTTCCTGTGTCGATGTCGATGTTGTCTGTGCAGGAGATGCA | |
| | GTTTTTGTGTAGAGAATGTAAATTTTCTGTAACCTTTTGAAATCTAGTTACTAATAAGCACTACTGTAAT | |
| | TTAGCACAGTTTAACTCCACCCTCATTTAAACTTCCTTTGATTCTTTCCGACCATGAAATAGTGCATAGT | |
| | TTGCCTGGAGAATCCACTCACGTTCATAAAGAGAATGTTGATGGCGCCGTGTAGAAGCCGCTCTGTATCC | |
| | ATCCACGCGTGCAGAGCTGCCAGCAGGGAGCTCACAGAAGGGGAGGGAGCACCAGGCCAGCTGAGCTGCA | |
| | CCCACAGTCCCGAGACTGGGATCCCCCACCCCAACAGTGATTTTGGAAAAAAAAATGAAAGTTCTGTTCG | |
| | TTTATCCATTGCGATCTGGGGAGCCCCATCTCGATATTTCCAATCCTGGCTACTTTTCTTAGAGAAAATA | |
| | AGTCCTTTTTTTCTGGCCTTGCTAATGGCAACAGAAGAAAGGGCTTCTTTGCGTGGTCCCCTGCTGGTGG | |
| | GGGTGGGTCCCCAGGGGGCCCCCTGCGGCCTGGGCCCCCCTGCCCACGGCCAGCTTCCTGCTGATGAACA | |
| | TGCTGTTTGTATTGTTTTAGGAAACCAGGCTGTTTTGTGAATAAAACGAATGCATGTTTGTGTCACGAAA | |
| | AAAAAAAAAAAAAAAAAAAAAAAAAAAAAAAAAAAAAAAAAA | |
| EGFR | CCCCGGCGCAGCGCGGCCGCAGCAGCCTCCGCCCCCCGCACGGTGTGAGCGCCCGACGCGGCCGAGGCGG | 228 |
| NM_005228 | CCGGAGTCCCGAGCTAGCCCCGGCGGCCGCCGCCGCCCAGACCGGACGACAGGCCACCTCGTCGGCGTCC | |
| | GCCCGAGTCCCCGCCTCGCCGCCAACGCCACAACCACCGCGCACGGCCCCCTGACTCCGTCCAGTATTGA | |
| | TCGGGAGAGCCGGAGCGAGCTCTTCGGGGAGCAGCGATGCGACCCTCCGGGACGGCCGGGGCAGCGCTCC | |
| | TGGCGCTGCTGGCTGCGCTCTGCCCGGCGAGTCGGGCTCTGGAGGAAAAGAAAGTTTGCCAAGGCACGAG | |
| | TAACAAGCTCACGCAGTTGGGCACTTTTGAAGATCATTTTCTCAGCCTCCAGAGGATGTTCAATAACTGT | |
| | GAGGTGGTCCTTGGGAATTTGGAAATTACCTATGTGCAGAGGAATTATGATCTTTCCTTCTTAAAGACCA | |
| | TCCAGGAGGTGGCTGGTTATGTCCTCATTGCCCTCAACACAGTGGAGCGAATTCCTTTGGAAAACCTGCA | |
| | GATCATCAGAGGAAATATGTACTACGAAAATTCCTATGCCTTAGCAGTCTTATCTAACTATGATGCAAAT | |
| | AAAACCGGACTGAAGGAGCTGCCCATGAGAAATTTACAGGAAATCCTGCATGGCGCCGTGCGGTTCAGCA | |
| | ACAACCCTGCCCTGTGCAACGTGGAGAGCATCCAGTGGCGGGACATAGTCAGCAGTGACTTTCTCAGCAA | |
| | CATGTCGATGGACTTCCAGAACCACCTGGGCAGCTGCCAAAAGTGTGATCCAAGCTGTCCCAATGGGAGC | |
| | TGCTGGGGTGCAGGAGAGGAGAACTGCCAGAAACTGACCAAAATCATCTGTGCCCAGCAGTGCTCCGGGC | |
| | GCTGCCGTGGCAAGTCCCCCAGTGACTGCTGCCACAACCAGTGTGCTGCAGGCTGCACAGGCCCCCGGGA | |
| | GAGCGACTGCCTGGTCTGCCGCAAATTCCGAGACGAAGCCACGTGCAAGGACACCTGCCCCCCACTCATG | |
| | CTCTACAACCCCACCACGTACCAGATGGATGTGAACCCCGAGGGCAAATACAGCTTTGGTGCCACCTGCG | |
| | TGAAGAAGTGTCCCCGTAATTATGTGGTGACAGATCACGGCTCGTGCGTCCGAGCCTGTGGGGCCGACAG | |
| | CTATGAGATGGAGGAAGACGGCGTCCGCAAGTGTAAGAAGTGCGAAGGGCCTTGCCGCAAAGTGTGTAAC | |
| | GGAATAGGTATTGGTGAATTTAAAGACTCACTCTCCATAAATGCTACGAATATTAAACACTTCAAAAACT | |
| | GCACCTCCATCAGTGGCGATCTCCACATCCTGCCGGTGGCATTTAGGGGTGACTCCTTCACACATACTCC | |
| | TCCTCTGGATCCACAGGAACTGGATATTCTGAAAACCGTAAAGGAAATCACAGGGTTTTTGCTGATTCAG | |
| | GCTTGGCCTGAAAACAGGACGGACCTCCATGCCTTTGAGAACCTAGAAATCATACGCGGCAGGACCAAGC | |
| | AACATGGTCAGTTTTCTCTTGCAGTCGTCAGCCTGAACATAACATCCTTGGGATTACGCTCCCTCAAGGA | |
| | GATAAGTGATGGAGATGTGATAATTTCAGGAAACAAAAATTTGTGCTATGCAAATACAATAAACTGGAAA | |
| | AAACTGTTTGGGACCTCCGGTCAGAAAACCAAAATTATAAGCAACAGAGGTGAAAACAGCTGCAAGGCCA | |
| | CAGGCCAGGTCTGCCATGCCTTGTGCTCCCCCGAGGGCTGCTGGGGCCCGGAGCCCAGGGACTGCGTCTC | |
| | TTGCCGGAATGTCAGCCGAGGCAGGGAATGCGTGGACAAGTGCAACCTTCTGGAGGGTGAGCCAAGGGAG | |
| | TTTGTGGAGAACTCTGAGTGCATACAGTGCCACCCAGAGTGCCTGCCTCAGGCCATGAACATCACCTGCA | |
| | CAGGACGGGGACCAGACAACTGTATCCAGTGTGCCCACTACATTGACGGCCCCCACTGCGTCAAGACCTG | |
| | CCCGGCAGGAGTCATGGGAGAAAACAACACCCTGGTCTGGAAGTACGCAGACGCCGGCCATGTGTGCCAC | |
| | CTGTGCCATCCAAACTGCACCTACGGATGCACTGGGCCAGGTCTTGAAGGCTGTCCAACGAATGGGCCTA | |
| | AGATCCCGTCCATCGCCACTGGGATGGTGGGGGCCCTCCTCTTGCTGCTGGTGGTGGCCCTGGGGATCGG | |
| | CCTCTTCATGCGAAGGCGCCACATCGTTCGGAAGCGCACGCTGCGGAGGCTGCTGCAGGAGAGGGAGCTT | |
| | GTGGAGCCTCTTACACCCAGTGGAGAAGCTCCCAACCAAGCTCTCTTGAGGATCTTGAAGGAAACTGAAT | |
| | TCAAAAAGATCAAAGTGCTGGGCTCCGGTGCGTTCGGCACGGTGTATAAGGGACTCTGGATCCCAGAAGG | |
| | TGAGAAAGTTAAAATTCCCGTCGCTATCAAGGAATTAAGAGAAGCAACATCTCCGAAAGCCAACAAGGAA | |
| | ATCCTCGATGAAGCCTACGTGATGGCCAGCGTGGACAACCCCCACGTGTGCCGCCTGCTGGGCATCTGCC | |
| | TCACCTCCACCGTGCAGCTCATCACGCAGCTCATGCCCTTCGGCTGCCTCCTGGACTATGTCCGGGAACA | |
| | CAAAGACAATATTGGCTCCCAGTACCTGCTCAACTGGTGTGTGCAGATCGCAAAGGGCATGAACTACTTG | |
| | GAGGACCGTCGCTTGGTGCACCGCGACCTGGCAGCCAGGAACGTACTGGTGAAAACACCGCAGCATGTCA | |
| | AGATCACAGATTTTGGGCTGGCCAAACTGCTGGGTGCGGAAGAGAAAGAATACCATGCAGAAGGAGGCAA | |
| | AGTGCCTATCAAGTGGATGGCATTGGAATCAATTTTACACAGAATCTATACCCACCAGAGTGATGTCTGG | |
| | AGCTACGGGGTGACCGTTTGGGAGTTGATGACCTTTGGATCCAAGCCATATGACGGAATCCCTGCCAGCG | |
| | AGATCTCCTCCATCCTGGAGAAAGGAGAACGCCTCCCTCAGCCACCCATATGTACCATCGATGTCTACAT | |
| | GATCATGGTCAAGTGCTGGATGATAGACGCAGATAGTCGCCCAAAGTTCCGTGAGTTGATCATCGAATTC | |
| | TCCAAAATGGCCCGAGACCCCCAGCGCTACCTTGTCATTCAGGGGGATGAAAGAATGCATTTGCCAAGTC | |
| | CTACAGACTCCAACTTCTACCGTGCCCTGATGGATGAAGAAGACATGGACGACGTGGTGGATGCCGACGA | |
| | GTACCTCATCCCACAGCAGGGCTTCTTCAGCAGCCCCTCCACGTCACGGACTCCCCTCCTGAGCTCTCTG | |
| | AGTGCAACCAGCAACAATTCCACCGTGGCTTGCATTGATAGAAATGGGCTGCAAAGCTGTCCCATCAAGG | |
| | AAGACAGCTTCTTGCAGCGATACAGCTCAGACCCCACAGGCGCCTTGACTGAGGACAGCATAGACGACAC | |
| | CTTCCTCCCAGTGCCTGAATACATAAACCAGTCCGTTCCCAAAAGGCCCGCTGGCTCTGTGCAGAATCCT | |
| | GTCTATCACAATCAGCCTCTGAACCCCGCGCCCAGCAGAGACCCACACTACCAGGACCCCCACAGCACTG | |
| | CAGTGGGCAACCCCGAGTATCTCAACACTGTCCAGCCCACCTGTGTCAACAGCACATTCGACAGCCCTGC | |
| | CCACTGGGCCCAGAAAGGCAGCCACCAAATTAGCCTGGACAACCCTGACTACCAGCAGGACTTCTTTCCC | |
| | AAGGAAGCCAAGCCAAATGGCATCTTTAAGGGCTCCACAGCTGAAAATGCAGAATACCTAAGGGTCGCGC | |
| | CACAAAGCAGTGAATTTATTGGAGCATGACCACGGAGGATAGTATGAGCCCTAAAAATCCAGACTCTTTC | |
| | GATACCCAGGACCAAGCCACAGCAGGTCCTCCATCCCAACAGCCATGCCCGCATTAGCTCTTAGACCCAC | |
| | AGACTGGTTTTGCAACGTTTACACCGACTAGCCAGGAAGTACTTCCACCTCGGGCACATTTTGGGAAGTT | |
| | GCATTCCTTTGTCTTCAAACTGTGAAGCATTTACAGAAACGCATCCAGCAAGAATATTGTCCCTTTGAGC | |
| | AGAAATTTATCTTTCAAAGAGGTATATTTGAAAAAAAAAAAAAGTATATGTGAGGATTTTTATTGATTGG | |
| | GGATCTTGGAGTTTTTCATTGTCGCTATTGATTTTTACTTCAATGGGCTCTTCCAACAAGGAAGAAGCTT | |
| | GCTGGTAGCACTTGCTACCCTGAGTTCATCCAGGCCCAACTGTGAGCAAGGAGCACAAGCCACAAGTCTT | |
| | CCAGAGGATGCTTGATTCCAGTGGTTCTGCTTCAAGGCTTCCACTGCAAAACACTAAAGATCCAAGAAGG | |
| | CCTTCATGGCCCCAGCAGGCCGGATCGGTACTGTATCAAGTCATGGCAGGTACAGTAGGATAAGCCACTC | |
| | TGTCCCTTCCTGGGCAAAGAAGAAACGGAGGGGATGGAATTCTTCCTTAGACTTACTTTTGTAAAAATGT | |
| | CCCCACGGTACTTACTCCCCACTGATGGACCAGTGGTTTCCAGTCATGAGCGTTAGACTGACTTGTTTGT | |
| | CTTCCATTCCATTGTTTTGAAACTCAGTATGCTGCCCCTGTCTTGCTGTCATGAAATCAGCAAGAGAGGA | |
| | TGACACATCAAATAATAACTCGGATTCCAGCCCACATTGGATTCATCAGCATTTGGACCAATAGCCCACA | |
| | GCTGAGAATGTGGAATACCTAAGGATAGCACCGCTTTTGTTCTCGCAAAAACGTATCTCCTAATTTGAGG | |
| | CTCAGATGAAATGCATCAGGTCCTTTGGGGCATAGATCAGAAGACTACAAAAATGAAGCTGCTCTGAAAT | |
| | CTCCTTTAGCCATCACCCCAACCCCCCAAAATTAGTTTGTGTTACTTATGGAAGATAGTTTTCTCCTTTT | |
| | ACTTCACTTCAAAAGCTTTTTACTCAAAGAGTATATGTTCCCTCCAGGTCAGCTGCCCCCAAACCCCCTC | |
| | CTTACGCTTTGTCACACAAAAAGTGTCTCTGCCTTGAGTCATCTATTCAAGCACTTACAGCTCTGGCCAC | |
| | AACAGGGCATTTTACAGGTGCGAATGACAGTAGCATTATGAGTAGTGTGGAATTCAGGTAGTAAATATGA | |
| | AACTAGGGTTTGAAATTGATAATGCTTTCACAACATTTGCAGATGTTTTAGAAGGAAAAAAGTTCCTTCC | |
| | TAAAATAATTTCTCTACAATTGGAAGATTGGAAGATTCAGCTAGTTAGGAGCCCACCTTTTTTCCTAATC | |
| | TGTGTGTGCCCTGTAACCTGACTGGTTAACAGCAGTCCTTTGTAAACAGTGTTTTAAACTCTCCTAGTCA | |
| | ATATCCACCCCATCCAATTTATCAAGGAAGAAATGGTTCAGAAAATATTTTCAGCCTACAGTTATGTTCA | |
| | GTCACACACACATACAAAATGTTCCTTTTGCTTTTAAAGTAATTTTTGACTCCCAGATCAGTCAGAGCCC | |
| | CTACAGCATTGTTAAGAAAGTATTTGATTTTTGTCTCAATGAAAATAAAACTATATTCATTTCCACTCTA | |
| | AAAAAAAAAAAAAAAA | |
| ERBB2 | GTTCCCGGATTTTTGTGGGCGCCTGCCCCGCCCCTCGTCCCCCTGCTGTGTCCATATATCGAGGCGATAG | 229 |
| NM_001005862 | GGTTAAGGGAAGGCGGACGCCTGATGGGTTAATGAGCAAACTGAAGTGTTTTCCATGATCTTTTTTGAGT | |
| | CGCAATTGAAGTACCACCTCCCGAGGGTGATTGCTTCCCCATGCGGGGTAGAACCTTTGCTGTCCTGTTC | |
| | ACCACTCTACCTCCAGCACAGAATTTGGCTTATGCCTACTCAATGTGAAGATGATGAGGATGAAAACCTT | |
| | TGTGATGATCCACTTCCACTTAATGAATGGTGGCAAAGCAAAGCTATATTCAAGACCACATGCAAAGCTA | |
| | CTCCCTGAGCAAAGAGTCACAGATAAAACGGGGGCACCAGTAGAATGGCCAGGACAAACGCAGTGCAGCA | |
| | CAGAGACTCAGACCCTGGCAGCCATGCCTGCGCAGGCAGTGATGAGAGTGACATGTACTGTTGTGGACAT | |
| | GCACAAAAGTGAGTGTGCACCGGCACAGACATGAAGCTGCGGCTCCCTGCCAGTCCCGAGACCCACCTGG | |
| | ACATGCTCCGCCACCTCTACCAGGGCTGCCAGGTGGTGCAGGGAAACCTGGAACTCACCTACCTGCCCAC | |
| | CAATGCCAGCCTGTCCTTCCTGCAGGATATCCAGGAGGTGCAGGGCTACGTGCTCATCGCTCACAACCAA | |
| | GTGAGGCAGGTCCCACTGCAGAGGCTGCGGATTGTGCGAGGCACCCAGCTCTTTGAGGACAACTATGCCC | |
| | TGGCCGTGCTAGACAATGGAGACCCGCTGAACAATACCACCCCTGTCACAGGGGCCTCCCCAGGAGGCCT | |
| | GCGGGAGCTGCAGCTTCGAAGCCTCACAGAGATCTTGAAAGGAGGGGTCTTGATCCAGCGGAACCCCCAG | |
| | CTCTGCTACCAGGACACGATTTTGTGGAAGGACATCTTCCACAAGAACAACCAGCTGGCTCTCACACTGA | |
| | TAGACACCAACCGCTCTCGGGCCTGCCACCCCTGTTCTCCGATGTGTAAGGGCTCCCGCTGCTGGGGAGA | |
| | GAGTTCTGAGGATTGTCAGAGCCTGACGCGCACTGTCTGTGCCGGTGGCTGTGCCCGCTGCAAGGGGCCA | |
| | CTGCCCACTGACTGCTGCCATGAGCAGTGTGCTGCCGGCTGCACGGGCCCCAAGCACTCTGACTGCCTGG | |
| | CCTGCCTCCACTTCAACCACAGTGGCATCTGTGAGCTGCACTGCCCAGCCCTGGTCACCTACAACACAGA | |
| | CACGTTTGAGTCCATGCCCAATCCCGAGGGCCGGTATACATTCGGCGCCAGCTGTGTGACTGCCTGTCCC | |
| | TACAACTACCTTTCTACGGACGTGGGATCCTGCACCCTCGTCTGCCCCCTGCACAACCAAGAGGTGACAG | |
| | CAGAGGATGGAACACAGCGGTGTGAGAAGTGCAGCAAGCCCTGTGCCCGAGTGTGCTATGGTCTGGGCAT | |
| | GGAGCACTTGCGAGAGGTGAGGGCAGTTACCAGTGCCAATATCCAGGAGTTTGCTGGCTGCAAGAAGATC | |
| | TTTGGGAGCCTGGCATTTCTGCCGGAGAGCTTTGATGGGGACCCAGCCTCCAACACTGCCCCGCTCCAGC | |
| | CAGAGCAGCTCCAAGTGTTTGAGACTCTGGAAGAGATCACAGGTTACCTATACATCTCAGCATGGCCGGA | |
| | CAGCCTGCCTGACCTCAGCGTCTTCCAGAACCTGCAAGTAATCCGGGGACGAATTCTGCACAATGGCGCC | |
| | TACTCGCTGACCCTGCAAGGGCTGGGCATCAGCTGGCTGGGGCTGCGCTCACTGAGGGAACTGGGCAGTG | |
| | GACTGGCCCTCATCCACCATAACACCCACCTCTGCTTCGTGCACACGGTGCCCTGGGACCAGCTCTTTCG | |
| | GAACCCGCACCAAGCTCTGCTCCACACTGCCAACCGGCCAGAGGACGAGTGTGTGGGCGAGGGCCTGGCC | |
| | TGCCACCAGCTGTGCGCCCGAGGGCACTGCTGGGGTCCAGGGCCCACCCAGTGTGTCAACTGCAGCCAGT | |
| | TCCTTCGGGGCCAGGAGTGCGTGGAGGAATGCCGAGTACTGCAGGGGCTCCCCAGGGAGTATGTGAATGC | |
| | CAGGCACTGTTTGCCGTGCCACCCTGAGTGTCAGCCCCAGAATGGCTCAGTGACCTGTTTTGGACCGGAG | |
| | GCTGACCAGTGTGTGGCCTGTGCCCACTATAAGGACCCTCCCTTCTGCGTGGCCCGCTGCCCCAGCGGTG | |
| | TGAAACCTGACCTCTCCTACATGCCCATCTGGAAGTTTCCAGATGAGGAGGGCGCATGCCAGCCTTGCCC | |
| | CATCAACTGCACCCACTCCTGTGTGGACCTGGATGACAAGGGCTGCCCCGCCGAGCAGAGAGCCAGCCCT | |
| | CTGACGTCCATCATCTCTGCGGTGGTTGGCATTCTGCTGGTCGTGGTCTTGGGGGTGGTCTTTGGGATCC | |
| | TCATCAAGCGACGGCAGCAGAAGATCCGGAAGTACACGATGCGGAGACTGCTGCAGGAAACGGAGCTGGT | |
| | GGAGCCGCTGACACCTAGCGGAGCGATGCCCAACCAGGCGCAGATGCGGATCCTGAAAGAGACGGAGCTG | |
| | AGGAAGGTGAAGGTGCTTGGATCTGGCGCTTTTGGCACAGTCTACAAGGGCATCTGGATCCCTGATGGGG | |
| | AGAATGTGAAAATTCCAGTGGCCATCAAAGTGTTGAGGGAAAACACATCCCCCAAAGCCAACAAAGAAAT | |
| | CTTAGACGAAGCATACGTGATGGCTGGTGTGGGCTCCCCATATGTCTCCCGCCTTCTGGGCATCTGCCTG | |
| | ACATCCACGGTGCAGCTGGTGACACAGCTTATGCCCTATGGCTGCCTCTTAGACCATGTCCGGGAAAACC | |
| | GCGGACGCCTGGGCTCCCAGGACCTGCTGAACTGGTGTATGCAGATTGCCAAGGGGATGAGCTACCTGGA | |
| | GGATGTGCGGCTCGTACACAGGGACTTGGCCGCTCGGAACGTGCTGGTCAAGAGTCCCAACCATGTCAAA | |
| | ATTACAGACTTCGGGCTGGCTCGGCTGCTGGACATTGACGAGACAGAGTACCATGCAGATGGGGGCAAGG | |
| | TGCCCATCAAGTGGATGGCGCTGGAGTCCATTCTCCGCCGGCGGTTCACCCACCAGAGTGATGTGTGGAG | |
| | TTATGGTGTGACTGTGTGGGAGCTGATGACTTTTGGGGCCAAACCTTACGATGGGATCCCAGCCCGGGAG | |
| | ATCCCTGACCTGCTGGAAAAGGGGGAGCGGCTGCCCCAGCCCCCCATCTGCACCATTGATGTCTACATGA | |
| | TCATGGTCAAATGTTGGATGATTGACTCTGAATGTCGGCCAAGATTCCGGGAGTTGGTGTCTGAATTCTC | |
| | CCGCATGGCCAGGGACCCCCAGCGCTTTGTGGTCATCCAGAATGAGGACTTGGGCCCAGCCAGTCCCTTG | |
| | GACAGCACCTTCTACCGCTCACTGCTGGAGGACGATGACATGGGGGACCTGGTGGATGCTGAGGAGTATC | |
| | TGGTACCCCAGCAGGGCTTCTTCTGTCCAGACCCTGCCCCGGGCGCTGGGGGCATGGTCCACCACAGGCA | |
| | CCGCAGCTCATCTACCAGGAGTGGCGGTGGGGACCTGACACTAGGGCTGGAGCCCTCTGAAGAGGAGGCC | |
| | CCCAGGTCTCCACTGGCACCCTCCGAAGGGGCTGGCTCCGATGTATTTGATGGTGACCTGGGAATGGGGG | |
| | CAGCCAAGGGGCTGCAAAGCCTCCCCACACATGACCCCAGCCCTCTACAGCGGTACAGTGAGGACCCCAC | |
| | AGTACCCCTGCCCTCTGAGACTGATGGCTACGTTGCCCCCCTGACCTGCAGCCCCCAGCCTGAATATGTG | |
| | AACCAGCCAGATGTTCGGCCCCAGCCCCCTTCGCCCCGAGAGGGCCCTCTGCCTGCTGCCCGACCTGCTG | |
| | GTGCCACTCTGGAAAGGCCCAAGACTCTCTCCCCAGGGAAGAATGGGGTCGTCAAAGACGTTTTTGCCTT | |
| | TGGGGGTGCCGTGGAGAACCCCGAGTACTTGACACCCCAGGGAGGAGCTGCCCCTCAGCCCCACCCTCCT | |
| | CCTGCCTTCAGCCCAGCCTTCGACAACCTCTATTACTGGGACCAGGACCCACCAGAGCGGGGGGCTCCAC | |
| | CCAGCACCTTCAAAGGGACACCTACGGCAGAGAACCCAGAGTACCTGGGTCTGGACGTGCCAGTGTGAAC | |
| | CAGAAGGCCAAGTCCGCAGAAGCCCTGATGTGTCCTCAGGGAGCAGGGAAGGCCTGACTTCTGCTGGCAT | |
| | CAAGAGGTGGGAGGGCCCTCCGACCACTTCCAGGGGAACCTGCCATGCCAGGAACCTGTCCTAAGGAACC | |
| | TTCCTTCCTGCTTGAGTTCCCAGATGGCTGGAAGGGGTCCAGCCTCGTTGGAAGAGGAACAGCACTGGGG | |
| | AGTCTTTGTGGATTCTGAGGCCCTGCCCAATGAGACTCTAGGGTCCAGTGGATGCCACAGCCCAGCTTGG | |
| | CCCTTTCCTTCCAGATCCTGGGTACTGAAAGCCTTAGGGAAGCTGGCCTGAGAGGGGAAGCGGCCCTAAG | |
| | GGAGTGTCTAAGAACAAAAGCGACCCATTCAGAGACTGTCCCTGAAACCTAGTACTGCCCCCCATGAGGA | |
| | AGGAACAGCAATGGTGTCAGTATCCAGGCTTTGTACAGAGTGCTTTTCTGTTTAGTTTTTACTTTTTTTG | |
| | TTTTGTTTTTTTAAAGATGAAATAAAGACCCAGGGGGAGAATGGGTGTTGTATGGGGAGGCAAGTGTGGG | |
| | GGGTCCTTCTCCACACCCACTTTGTCCATTTGCAAATATATTTTGGAAAACAGCTA | |
| ESR1 | ATGGTCATAACAGCCTCCTGTCTACCGACTCAGAACGGATTTTACCAAAACTGAAAATGCAGGCTCCATG | 230 |
| NM_001122742 | CTCAGAAGCTCTTTAACAGGCTCGAAAGGTCCATGCTCCTTTCTCCTGCCCATTCTATAGCATAAGAAGA | |
| | CAGTCTCTGAGTGATAATCTTCTCTTCAAGAAGAAGAAAACTAGGAAGGAGTAAGCACAAAGATCTCTTC | |
| | ACATTCTCCGGGACTGCGGTACCAAATATCAGCACAGCACTTCTTGAAAAAGGATGTAGATTTTAATCTG | |
| | AACTTTGAACCATCACTGAGGTGGCCCGCCGGTTTCTGAGCCTTCTGCCCTGCGGGGACACGGTCTGCAC | |
| | CCTGCCCGCGGCCACGGACCATGACCATGACCCTCCACACCAAAGCATCTGGGATGGCCCTACTGCATCA | |
| | GATCCAAGGGAACGAGCTGGAGCCCCTGAACCGTCCGCAGCTCAAGATCCCCCTGGAGCGGCCCCTGGGC | |
| | GAGGTGTACCTGGACAGCAGCAAGCCCGCCGTGTACAACTACCCCGAGGGCGCCGCCTACGAGTTCAACG | |
| | CCGCGGCCGCCGCCAACGCGCAGGTCTACGGTCAGACCGGCCTCCCCTACGGCCCCGGGTCTGAGGCTGC | |
| | GGCGTTCGGCTCCAACGGCCTGGGGGGTTTCCCCCCACTCAACAGCGTGTCTCCGAGCCCGCTGATGCTA | |
| | CTGCACCCGCCGCCGCAGCTGTCGCCTTTCCTGCAGCCCCACGGCCAGCAGGTGCCCTACTACCTGGAGA | |
| | ACGAGCCCAGCGGCTACACGGTGCGCGAGGCCGGCCCGCCGGCATTCTACAGGCCAAATTCAGATAATCG | |
| | ACGCCAGGGTGGCAGAGAAAGATTGGCCAGTACCAATGACAAGGGAAGTATGGCTATGGAATCTGCCAAG | |
| | GAGACTCGCTACTGTGCAGTGTGCAATGACTATGCTTCAGGCTACCATTATGGAGTCTGGTCCTGTGAGG | |
| | GCTGCAAGGCCTTCTTCAAGAGAAGTATTCAAGGACATAACGACTATATGTGTCCAGCCACCAACCAGTG | |
| | CACCATTGATAAAAACAGGAGGAAGAGCTGCCAGGCCTGCCGGCTCCGCAAATGCTACGAAGTGGGAATG | |
| | ATGAAAGGTGGGATACGAAAAGACCGAAGAGGAGGGAGAATGTTGAAACACAAGCGCCAGAGAGATGATG | |
| | GGGAGGGCAGGGGTGAAGTGGGGTCTGCTGGAGACATGAGAGCTGCCAACCTTTGGCCAAGCCCGCTCAT | |
| | GATCAAACGCTCTAAGAAGAACAGCCTGGCCTTGTCCCTGACGGCCGACCAGATGGTCAGTGCCTTGTTG | |
| | GATGCTGAGCCCCCCATACTCTATTCCGAGTATGATCCTACCAGACCCTTCAGTGAAGCTTCGATGATGG | |
| | GCTTACTGACCAACCTGGCAGACAGGGAGCTGGTTCACATGATCAACTGGGCGAAGAGGGTGCCAGGCTT | |
| | TGTGGATTTGACCCTCCATGATCAGGTCCACCTTCTAGAATGTGCCTGGCTAGAGATCCTGATGATTGGT | |
| | CTCGTCTGGCGCTCCATGGAGCACCCAGGGAAGCTACTGTTTGCTCCTAACTTGCTCTTGGACAGGAACC | |
| | AGGGAAAATGTGTAGAGGGCATGGTGGAGATCTTCGACATGCTGCTGGCTACATCATCTCGGTTCCGCAT | |
| | GATGAATCTGCAGGGAGAGGAGTTTGTGTGCCTCAAATCTATTATTTTGCTTAATTCTGGAGTGTACACA | |
| | TTTCTGTCCAGCACCCTGAAGTCTCTGGAAGAGAAGGACCATATCCACCGAGTCCTGGACAAGATCACAG | |
| | ACACTTTGATCCACCTGATGGCCAAGGCAGGCCTGACCCTGCAGCAGCAGCACCAGCGGCTGGCCCAGCT | |
| | CCTCCTCATCCTCTCCCACATCAGGCACATGAGTAACAAAGGCATGGAGCATCTGTACAGCATGAAGTGC | |
| | AAGAACGTGGTGCCCCTCTATGACCTGCTGCTGGAGATGCTGGACGCCCACCGCCTACATGCGCCCACTA | |
| | GCCGTGGAGGGGCATCCGTGGAGGAGACGGACCAAAGCCACTTGGCCACTGCGGGCTCTACTTCATCGCA | |
| | TTCCTTGCAAAAGTATTACATCACGGGGGAGGCAGAGGGTTTCCCTGCCACGGTCTGAGAGCTCCCTGGC | |
| | TCCCACACGGTTCAGATAATCCCTGCTGCATTTTACCCTCATCATGCACCACTTTAGCCAAATTCTGTCT | |
| | CCTGCATACACTCCGGCATGCATCCAACACCAATGGCTTTCTAGATGAGTGGCCATTCATTTGCTTGCTC | |
| | AGTTCTTAGTGGCACATCTTCTGTCTTCTGTTGGGAACAGCCAAAGGGATTCCAAGGCTAAATCTTTGTA | |
| | ACAGCTCTCTTTCCCCCTTGCTATGTTACTAAGCGTGAGGATTCCCGTAGCTCTTCACAGCTGAACTCAG | |
| | TCTATGGGTTGGGGCTCAGATAACTCTGTGCATTTAAGCTACTTGTAGAGACCCAGGCCTGGAGAGTAGA | |
| | CATTTTGCCTCTGATAAGCACTTTTTAAATGGCTCTAAGAATAAGCCACAGCAAAGAATTTAAAGTGGCT | |
| | CCTTTAATTGGTGACTTGGAGAAAGCTAGGTCAAGGGTTTATTATAGCACCCTCTTGTATTCCTATGGCA | |
| | ATGCATCCTTTTATGAAAGTGGTACACCTTAAAGCTTTTATATGACTGTAGCAGAGTATCTGGTGATTGT | |
| | CAATTCATTCCCCCTATAGGAATACAAGGGGCACACAGGGAAGGCAGATCCCCTAGTTGGCAAGACTATT | |
| | TTAACTTGATACACTGCAGATTCAGATGTGCTGAAAGCTCTGCCTCTGGCTTTCCGGTCATGGGTTCCAG | |
| | TTAATTCATGCCTCCCATGGACCTATGGAGAGCAGCAAGTTGATCTTAGTTAAGTCTCCCTATATGAGGG | |
| | ATAAGTTCCTGATTTTTGTTTTTATTTTTGTGTTACAAAAGAAAGCCCTCCCTCCCTGAACTTGCAGTAA | |
| | GGTCAGCTTCAGGACCTGTTCCAGTGGGCACTGTACTTGGATCTTCCCGGCGTGTGTGTGCCTTACACAG | |
| | GGGTGAACTGTTCACTGTGGTGATGCATGATGAGGGTAAATGGTAGTTGAAAGGAGCAGGGGCCCTGGTG | |
| | TTGCATTTAGCCCTGGGGCATGGAGCTGAACAGTACTTGTGCAGGATTGTTGTGGCTACTAGAGAACAAG | |
| | AGGGAAAGTAGGGCAGAAACTGGATACAGTTCTGAGGCACAGCCAGACTTGCTCAGGGTGGCCCTGCCAC | |
| | AGGCTGCAGCTACCTAGGAACATTCCTTGCAGACCCCGCATTGCCCTTTGGGGGTGCCCTGGGATCCCTG | |
| | GGGTAGTCCAGCTCTTCTTCATTTCCCAGCGTGGCCCTGGTTGGAAGAAGCAGCTGTCACAGCTGCTGTA | |
| | GACAGCTGTGTTCCTACAATTGGCCCAGCACCCTGGGGCACGGGAGAAGGGTGGGGACCGTTGCTGTCAC | |
| | TACTCAGGCTGACTGGGGCCTGGTCAGATTACGTATGCCCTTGGTGGTTTAGAGATAATCCAAAATCAGG | |
| | GTTTGGTTTGGGGAAGAAAATCCTCCCCCTTCCTCCCCCGCCCCGTTCCCTACCGCCTCCACTCCTGCCA | |
| | GCTCATTTCCTTCAATTTCCTTTGACCTATAGGCTAAAAAAGAAAGGCTCATTCCAGCCACAGGGCAGCC | |
| | TTCCCTGGGCCTTTGCTTCTCTAGCACAATTATGGGTTACTTCCTTTTTCTTAACAAAAAAGAATGTTTG | |
| | ATTTCCTCTGGGTGACCTTATTGTCTGTAATTGAAACCCTATTGAGAGGTGATGTCTGTGTTAGCCAATG | |
| | ACCCAGGTGAGCTGCTCGGGCTTCTCTTGGTATGTCTTGTTTGGAAAAGTGGATTTCATTCATTTCTGAT | |
| | TGTCCAGTTAAGTGATCACCAAAGGACTGAGAATCTGGGAGGGCAAAAAAAAAAAAAAAGTTTTTATGTG | |
| | CACTTAAATTTGGGGACAATTTTATGTATCTGTGTTAAGGATATGTTTAAGAACATAATTCTTTTGTTGC | |
| | TGTTTGTTTAAGAAGCACCTTAGTTTGTTTAAGAAGCACCTTATATAGTATAATATATATTTTTTTGAAA | |
| | TTACATTGCTTGTTTATCAGACAATTGAATGTAGTAATTCTGTTCTGGATTTAATTTGACTGGGTTAACA | |
| | TGCAAAAACCAAGGAAAAATATTTAGTTTTTTTTTTTTTTTTTGTATACTTTTCAAGCTACCTTGTCATG | |
| | TATACAGTCATTTATGCCTAAAGCCTGGTGATTATTCATTTAAATGAAGATCACATTTCATATCAACTTT | |
| | TGTATCCACAGTAGACAAAATAGCACTAATCCAGATGCCTATTGTTGGATACTGAATGACAGACAATCTT | |
| | ATGTAGCAAAGATTATGCCTGAAAAGGAAAATTATTCAGGGCAGCTAATTTTGCTTTTACCAAAATATCA | |
| | GTAGTAATATTTTTGGACAGTAGCTAATGGGTCAGTGGGTTCTTTTTAATGTTTATACTTAGATTTTCTT | |
| | TTAAAAAAATTAAAATAAAACAAAAAAAAATTTCTAGGACTAGACGATGTAATACCAGCTAAAGCCAAAC | |
| | AATTATACAGTGGAAGGTTTTACATTATTCATCCAATGTGTTTCTATTCATGTTAAGATACTACTACATT | |
| | TGAAGTGGGCAGAGAACATCAGATGATTGAAATGTTCGCCCAGGGGTCTCCAGCAACTTTGGAAATCTCT | |
| | TTGTATTTTTACTTGAAGTGCCACTAATGGACAGCAGATATTTTCTGGCTGATGTTGGTATTGGGTGTAG | |
| | GAACATGATTTAAAAAAAAACTCTTGCCTCTGCTTTCCCCCACTCTGAGGCAAGTTAAAATGTAAAAGAT | |
| | GTGATTTATCTGGGGGGCTCAGGTATGGTGGGGAAGTGGATTCAGGAATCTGGGGAATGGCAAATATATT | |
| | AAGAAGAGTATTGAAAGTATTTGGAGGAAAATGGTTAATTCTGGGTGTGCACCAGGGTTCAGTAGAGTCC | |
| | ACTTCTGCCCTGGAGACCACAAATCAACTAGCTCCATTTACAGCCATTTCTAAAATGGCAGCTTCAGTTC | |
| | TAGAGAAGAAAGAACAACATCAGCAGTAAAGTCCATGGAATAGCTAGTGGTCTGTGTTTCTTTTCGCCAT | |
| | TGCCTAGCTTGCCGTAATGATTCTATAATGCCATCATGCAGCAATTATGAGAGGCTAGGTCATCCAAAGA | |
| | GAAGACCCTATCAATGTAGGTTGCAAAATCTAACCCCTAAGGAAGTGCAGTCTTTGATTTGATTTCCCTA | |
| | GTAACCTTGCAGATATGTTTAACCAAGCCATAGCCCATGCCTTTTGAGGGCTGAACAAATAAGGGACTTA | |
| | CTGATAATTTACTTTTGATCACATTAAGGTGTTCTCACCTTGAAATCTTATACACTGAAATGGCCATTGA | |
| | TTTAGGCCACTGGCTTAGAGTACTCCTTCCCCTGCATGACACTGATTACAAATACTTTCCTATTCATACT | |
| | TTCCAATTATGAGATGGACTGTGGGTACTGGGAGTGATCACTAACACCATAGTAATGTCTAATATTCACA | |
| | GGCAGATCTGCTTGGGGAAGCTAGTTATGTGAAAGGCAAATAGAGTCATACAGTAGCTCAAAAGGCAACC | |
| | ATAATTCTCTTTGGTGCAGGTCTTGGGAGCGTGATCTAGATTACACTGCACCATTCCCAAGTTAATCCCC | |
| | TGAAAACTTACTCTCAACTGGAGCAAATGAACTTTGGTCCCAAATATCCATCTTTTCAGTAGCGTTAATT | |
| | ATGCTCTGTTTCCAACTGCATTTCCTTTCCAATTGAATTAAAGTGTGGCCTCGTTTTTAGTCATTTAAAA | |
| | TTGTTTTCTAAGTAATTGCTGCCTCTATTATGGCACTTCAATTTTGCACTGTCTTTTGAGATTCAAGAAA | |
| | AATTTCTATTCTTTTTTTTGCATCCAATTGTGCCTGAACTTTTAAAATATGTAAATGCTGCCATGTTCCA | |
| | AACCCATCGTCAGTGTGTGTGTTTAGAGCTGTGCACCCTAGAAACAACATATTGTCCCATGAGCAGGTGC | |
| | CTGAGACACAGACCCCTTTGCATTCACAGAGAGGTCATTGGTTATAGAGACTTGAATTAATAAGTGACAT | |
| | TATGCCAGTTTCTGTTCTCTCACAGGTGATAAACAATGCTTTTTGTGCACTACATACTCTTCAGTGTAGA | |
| | GCTCTTGTTTTATGGGAAAAGGCTCAAATGCCAAATTGTGTTTGATGGATTAATATGCCCTTTTGCCGAT | |
| | GCATACTATTACTGATGTGACTCGGTTTTGTCGCAGCTTTGCTTTGTTTAATGAAACACACTTGTAAACC | |
| | TCTTTTGCACTTTGAAAAAGAATCCAGCGGGATGCTCGAGCACCTGTAAACAATTTTCTCAACCTATTTG | |
| | ATGTTCAAATAAAGAATTAAACTAAA | |
| EXO1 | AAATTGAAAGGTCAGCCTTTCGCGCGCTGTGTAGGCAAGTTACCCGTGTTCTGCGTTGCCGGCCGTGGGT | 231 |
| NM_130398 | GCTCTGGCCACAGTGAGTTAGGGGCGTCGGAGCGGGTTTCTCCAACCGCAATCGGCTCCGCTCAAGGGGA | |
| | GGAGGAGAGTCCCTTCTCGGAAGGCCTAAGGAAACGTGTCGTCTGGAATGGGCTTGGGGGCCACGCCTGC | |
| | ACATCTCCGCGAGACAGAGGGATAAAGTGAAGATGGTGCTGTTATTGTTACCTCGAGTGCCACATGCGAC | |
| | CTCTGAGATATGTACACAGTCATTCTTACTATCGCACTCAGCCATTCTTACTACGCTAAAGAAGAAATAA | |
| | TTATTCGAGGATATTTGCCTGGCCCAGAAGAAACTTATGTAAATTTCATGAACTATTATATCCGTTTTCC | |
| | TCGGAGTGAGAGAAAACTCTTTTTAGATATCATCTGAGAGAACTAGTGAATCCCAGTCACTGAGTGGAGT | |
| | TGAGAGTCTAAGAACCTCTGAAATTTGAGAACTGCTGGACCAGAGCCTTTAGAGCTCTGATAAGGTGTCA | |
| | ACAGGGTAGTTAATTTGGCACCATGGGGATACAGGGATTGCTACAATTTATCAAAGAAGCTTCAGAACCC | |
| | ATCCATGTGAGGAAGTATAAAGGGCAGGTAGTAGCTGTGGATACATATTGCTGGCTTCACAAAGGAGCTA | |
| | TTGCTTGTGCTGAAAAACTAGCCAAAGGTGAACCTACTGATAGGTATGTAGGATTTTGTATGAAATTTGT | |
| | AAATATGTTACTATCTCATGGGATCAAGCCTATTCTCGTATTTGATGGATGTACTTTACCTTCTAAAAAG | |
| | GAAGTAGAGAGATCTAGAAGAGAAAGACGACAAGCCAATCTTCTTAAGGGAAAGCAACTTCTTCGTGAGG | |
| | GGAAAGTCTCGGAAGCTCGAGAGTGTTTCACCCGGTCTATCAATATCACACATGCCATGGCCCACAAAGT | |
| | AATTAAAGCTGCCCGGTCTCAGGGGGTAGATTGCCTCGTGGCTCCCTATGAAGCTGATGCGCAGTTGGCC | |
| | TATCTTAACAAAGCGGGAATTGTGCAAGCCATAATTACAGAGGACTCGGATCTCCTAGCTTTTGGCTGTA | |
| | AAAAGGTAATTTTAAAGATGGACCAGTTTGGAAATGGACTTGAAATTGATCAAGCTCGGCTAGGAATGTG | |
| | CAGACAGCTTGGGGATGTATTCACGGAAGAGAAGTTTCGTTACATGTGTATTCTTTCAGGTTGTGACTAC | |
| | CTGTCATCACTGCGTGGGATTGGATTAGCAAAGGCATGCAAAGTCCTAAGACTAGCCAATAATCCAGATA | |
| | TAGTAAAGGTTATCAAGAAAATTGGACATTATCTCAAGATGAATATCACGGTACCAGAGGATTACATCAA | |
| | CGGGTTTATTCGGGCCAACAATACCTTCCTCTATCAGCTAGTTTTTGATCCCATCAAAAGGAAACTTATT | |
| | CCTCTGAACGCCTATGAAGATGATGTTGATCCTGAAACACTAAGCTACGCTGGGCAATATGTTGATGATT | |
| | CCATAGCTCTTCAAATAGCACTTGGAAATAAAGATATAAATACTTTTGAACAGATCGATGACTACAATCC | |
| | AGACACTGCTATGCCTGCCCATTCAAGAAGTCATAGTTGGGATGACAAAACATGTCAAAAGTCAGCTAAT | |
| | GTTAGCAGCATTTGGCATAGGAATTACTCTCCCAGACCAGAGTCGGGTACTGTTTCAGATGCCCCACAAT | |
| | TGAAGGAAAATCCAAGTACTGTGGGAGTGGAACGAGTGATTAGTACTAAAGGGTTAAATCTCCCAAGGAA | |
| | ATCATCCATTGTGAAAAGACCAAGAAGTGCAGAGCTGTCAGAAGATGACCTGTTGAGTCAGTATTCTCTT | |
| | TCATTTACGAAGAAGACCAAGAAAAATAGCTCTGAAGGCAATAAATCATTGAGCTTTTCTGAAGTGTTTG | |
| | TGCCTGACCTGGTAAATGGACCTACTAACAAAAAGAGTGTAAGCACTCCACCTAGGACGAGAAATAAATT | |
| | TGCAACATTTTTACAAAGGAAAAATGAAGAAAGTGGTGCAGTTGTGGTTCCAGGGACCAGAAGCAGGTTT | |
| | TTTTGCAGTTCAGATTCTACTGACTGTGTATCAAACAAAGTGAGCATCCAGCCTCTGGATGAAACTGCTG | |
| | TCACAGATAAAGAGAACAATCTGCATGAATCAGAGTATGGAGACCAAGAAGGCAAGAGACTGGTTGACAC | |
| | AGATGTAGCACGTAATTCAAGTGATGACATTCCGAATAATCATATTCCAGGTGATCATATTCCAGACAAG | |
| | GCAACAGTGTTTACAGATGAAGAGTCCTACTCTTTTGAGAGCAGCAAATTTACAAGGACCATTTCACCAC | |
| | CCACTTTGGGAACACTAAGAAGTTGTTTTAGTTGGTCTGGAGGTCTTGGAGATTTTTCAAGAACGCCGAG | |
| | CCCCTCTCCAAGCACAGCATTGCAGCAGTTCCGAAGAAAGAGCGATTCCCCCACCTCTTTGCCTGAGAAT | |
| | AATATGTCTGATGTGTCGCAGTTAAAGAGCGAGGAGTCCAGTGACGATGAGTCTCATCCCTTACGAGAAG | |
| | AGGCATGTTCTTCACAGTCCCAGGAAAGTGGAGAATTCTCACTGCAGAGTTCAAATGCATCAAAGCTTTC | |
| | TCAGTGCTCTAGTAAGGACTCTGATTCAGAGGAATCTGATTGCAATATTAAGTTACTTGACAGTCAAAGT | |
| | GACCAGACCTCCAAGCTACGTTTATCTCATTTCTCAAAAAAAGACACACCTCTAAGGAACAAGGTTCCTG | |
| | GGCTATATAAGTCCAGTTCTGCAGACTCTCTTTCTACAACCAAGATCAAACCTCTAGGACCTGCCAGAGC | |
| | CAGTGGGCTGAGCAAGAAGCCGGCAAGCATCCAGAAGAGAAAGCATCATAATGCCGAGAACAAGCCGGGG | |
| | TTACAGATCAAACTCAATGAGCTCTGGAAAAACTTTGGATTTAAAAAAGATTCTGAAAAGCTTCCTCCTT | |
| | GTAAGAAACCCCTGTCCCCAGTCAGAGATAACATCCAACTAACTCCAGAAGCGGAAGAGGATATATTTAA | |
| | CAAACCTGAATGTGGCCGTGTTCAAAGAGCAATATTCCAGTAAATGCAGACTGCTGCAAAGCTTTTGCCT | |
| | GCAAGAGAATCTGATCAATTTGAAGTCCCTGTTTGGGAATGAGGCACTTATCAGCATGAAGAATTTTTTC | |
| | TCATTCTGTGCCATTTTAAAAATAGAATACATTTTGTATATTAACTTTATAATTGGGTTGTGGTTTTTTT | |
| | GCTCAGCTTTTTATATTTTTATAAGAAGCTAAATAGAAGAATAATTGTATCTCTGACAGGTTTTTGGAGG | |
| | TTTTAGTGTTAATTGGGAAAATCCTCTGGAGTTTATAAAAGTCTACTCTAAATATTTCTGTAATGTTGTC | |
| | AAGTAGAAAGATAGTAAATGGAGAAACTACAAAAAAAAAAAAAAAAAA | |
| FGF4 | CCATGACCTGCCTTGAGAAGGGGCAGGGGAAGCCAGATGGACTGGAAGTGGAGTGGCAGTGACCAAGGAG | 232 |
| AB209631 | GAGGAGGTGTGATAGGCTTCCCACGCAGGGTAGATCCAGAGACACCAGTGCCACCCATAGGCCCCTAGGA | |
| | CTGCAGTGGTCACCCGATTCCTTTGTCCCAGCTGAGACTCAGTTCTGAGTGTTCTATTTTGGGGAACAGA | |
| | GGCGTCCTTGGTAGCATTTGGAAGAGGATAGCCAGCTGGGGTGTGTGTACATCACAGCCTGACAGTAACA | |
| | GCATCCGAACCAGAGGTGACTGGCTAAGGGCAGACCCAGGGCAACAGGTTAACCGTTCTAGGGCCGGGCA | |
| | CAGGGAGGAGAACATTCCAACACTCTGTGTGCCCAGTGCCGACGCACGTTCTCTCTTTTATCCTCAAAAC | |
| | AGTCCTATGAGGATATAAGCCAGAGAGAGACAGAGACAAGGAATTACAAGTTGGTGAGAGTCAGGATTTG | |
| | AACTTGGCTCTGGCAGATGGAAAATTAGGGTCTGTATTCTTTACAAAACCGTGTGTGCCTCAGATGGAGT | |
| | TGGTGCATAACAAGCAGAGGTATCCAGGGTCGCGGTCCTGCTTGCCACGGAAGGGGCCGCCTTGTCAGTT | |
| | GTGACCACCCAGCCCTGGAAATGTCAGTAATGCTGTAAGGAGTGGGGATCGGATCAGATGCCATCCAGAT | |
| | GCTGAAGTTTGACCTTGTGTCATTTTTCACTTTCTTTTTTGGCTCTTCTGCAATCAATTCATTTATTTAG | |
| | CAAAAAAGAAATTATGTGTGCCGAGAGCATGCAGAAGATATGTCTCCGTTCTCTGCTTCCCTCCAAAAAA | |
| | GAATCCCAAAACTGCTTTCTGTGAACGTGTGCCAGGGTCCCAGCAGGACTCAGGGAGAGCAGGAAGCCCA | |
| | GCCCAGACCCCTTGCACAACCTACCGTGGGGAGGCCTTAGGCTCTGGCTACTACAGAGCTGGTTCCAGTC | |
| | TGCACTGCCACAGCCTGGCCAGGGACTTGGACACATCTGCTGGCCACTTCCTGTCTCAGTTTCCTTATCT | |
| | GCAAAATAAGGGAAAAGCCCCCACAAAGGTGCACGTGTAGCAGGAGCTCTTTTCCCTCCCTATTTTAGGA | |
| | AGGCAGTTGGTGGGAAGTCCAGCTTGGGTCCCTGAGAGCTGTGAGAAGGAGATGCGGCTGCTGCTGGCCC | |
| | TGTTGGGGGTCCTGCTGAGTGTGCCTGGGCCTCCAGTCTTGTCCCTGGAGGCCTCTGAGGAAGTGGAGCT | |
| | TGGTATGGCTTCTGAGGTGGGAGAGGGTGGCAGGGGTGGGAAGAGTGGGCACCAGGAGGGGGCTGCTGGG | |
| | CTGAGCAAAGCTGGAAAGGATCCTTGCCCAGGCCCTGAGAAGGTGGCGGCAGGGCAGGGCTCAACCACTG | |
| | AGACTCAGTCAGTGCCTGGCTTCCAGCAAGCATTCATCTATCACTGTGTCTGCGAGAGAGGACTGGCCTT | |
| | GCAGGGCGCAGGGCCCTAAGCTGGGCTGCAGAGCTGGTGGTGAGCTCCTTGCCTGGGTGTGTGTGCGTGT | |
| | GTGTGTGTGTTCTGTGCACTGGGTGTGTGACCTAGGAGGTCCAGGCAGCATGTGTGGTATAAGCATTATG | |
| | AGGGTGATATGCCCCGGTGCAGCATGACCCTGTATGTGGCACCAACAGCATGTGCCTTGTGTGTGTGTGT | |
| | GTCCGTATGTGTGTGTGTGTATGCGTGTGTGTGTGTGTGTGTGTGTGTCTTGGCCACTGTCATGTGCACT | |
| | AAATGCTGTGTGTGTGACATGCCCCAAGAGTGTGGCATTTGCCCTGGGTGTGGCATCCGCAGCATGTGGC | |
| | TGTGTGGGTGTCAAGGAGTGGTGGCTCCTTCAGCATGCGTTGCGAAGTGCTTGTGCCCTGCATGTGCGGT | |
| | GTGTTCTCTGTACACAGGAGGCTGCCTCAGATGGGGCTGCGGGGTCTGCTGACCTCTGCCCTCTGCCCAC | |
| | AGAGCCCTGCCTGGCTCCCAGCCTGGAGCAGCAAGAGCAGGAGCTGACAGTAGCCCTTGGGCAGCCTGTG | |
| | CGGCTGTGCTGTGGGCGGGCTGAGCGTGGTGGCCACTGGTACAAGGAGGGCAGTCGCCTGGCACCTGCTG | |
| | GCCGTGTACGGGGCTGGAGGGGCCGCCTAGAGATTGCCAGCTTCCTACCTGAGGATGCTGGCCGCTACCT | |
| | CTGCCTGGCACGAGGCTCCATGATCGTCCTGCAGAATCTCACCTTGATTACAGGTGACTCCTTGACCTCC | |
| | AGCAACGATGATGAGGACCCCAAGTCCCATAGGGACCTCTCGAATAGGCACAGTTACCCCCAGCAAGGTC | |
| | AGTAGGTCTCCAAGGACTTGTGTCCCCGCTGCTGCTCATCTGATCACTGAGAAGAGGAGGCCTGTGTGGG | |
| | AACACACGGTCATTCTAGGGGCCTTCCCCTGCCCTCCAGCACCCTACTGGACACACCCCCAGCGCATGGA | |
| | GAAGAAACTGCATGCAGTACCTGCGGGGAACACCGTCAAGTTCCGCTGTCCAGCTGCAGGCAACCCCACG | |
| | CCCACCATCCGCTGGCTTAAGGATGGACAGGCCTTTCATGGGGAGAACCGCATTGGAGGCATTCGGCTGC | |
| | GCCATCAGCACTGGAGTCTCGTGATGGAGAGCGTGGTGCCCTCGGACCGCGGCACATACACCTGCCTGGT | |
| | AGAGAACGCTGTGGGCAGCATCCGTTATAACTACCTGCTAGATGTGCTGGAGCGGTCCCCGCACCGGCCC | |
| | ATCCTGCAGGCCGGGCTCCCGGCCAACACCACAGCCGTGGTGGGCAGCGACGTGGAGCTGCTGTGCAAGG | |
| | TGTACAGCGATGCCCAGCCCCACATCCAGTGGCTGAAGCACATCGTCATCAACGGCAGCAGCTTCGGAGC | |
| | CGACGGTTTCCCCTATGTGCAAGTCCTAAAGACTGCAGACATCAATAGCTCAGAGGTGGAGGTCCTGTAC | |
| | CTGCGGAACGTGTCAGCCGAGGACGCAGGCGAGTACACCTGCCTCGCAGGCAATTCCATCGGCCTCTCCT | |
| | ACCAGTCTGCCTGGCTCACGGTGCTGCCAGGTGAGCACCTGAAGGGCCAGGAGATGCTGCGAGATGCCCC | |
| | TCTGGGCCAGCAGTGGGGGCTGTGGCCTGTTGGGTGGTCAGTCTCTGTTGGCCTGTGGGGTCTGGCCTGG | |
| | GGGGCAGTGTGTGGATTTGTGGGTTTGAGCTGTATGACAGCCCCTCTGTGCCTCTCCACACGTGGCCGTC | |
| | CATGTGACCGTCTGCTGAGGTGTGGGTGCCTGGGACTGGGCATAACTACAGCTTCCTCCGTGTGTGTCCC | |
| | CACATATGTTGGGAGCTGGGAGGGACTGAGTTAGGGTGCACGGGGCGGCCAGTCTCACCACTGACCAGTT | |
| | TGTCTGTCTGTGTGTGTCCATGTGCGAGGGCAGAGGAGGACCCCACATGGACCGCAGCAGCGCCCGAGGC | |
| | CAGGTATACGGACATCATCCTGTACGCGTCGGGCTCCCTGGCCTTGGCTGTGCTCCTGCTGCTGGCCAGG | |
| | CTGTATCGAGGGCAGGCGCTCCACGGCCGGCACCCCCGCCCGCCCGCCACTGTGCAGAAGCTCTCCCGCT | |
| | TCCCTCTGGCCCGACAGTTCTCCCTGGAGTCAGGCTCTTCCGGCAAGTCAAGCTCATCCCTGGTACGAGG | |
| | CGTGCGTCTCTCCTCCAGCGGCCCCGCCTTGCTCGCCGGCCTCGTGAGTCTAGATCTACCTCTCGACCCA | |
| | CTATGGGAGTTCCCCCGGGACAGGCTGGTGCTTGGGAAGCCCCTAGGCGAGGGCTGCTTTGGCCAGGTAG | |
| | TACGTGCAGAGGCCTTTGGCATGGACCCTGCCCGGCCTGACCAAGCCAGCACTGTGGCCGTCAAGATGCT | |
| | CAAAGACAACGCCTCTGACAAGGACCTGGCCGACCTGGTCTCGGAGATGGAGGTGATGAAGCTGATCGGC | |
| | CGACACAAGAACATCATCAACCTGCTTGGTGTCTGCACCCAGGAAGGGCCCCTGTACGTGATCGTGGAGT | |
| | GCGCCGCCAAGGGAAACCTGCGGGAGTTCCTGCGGGCCCGGCGCCCCCCAGGCCCCGACCTCAGCCCCGA | |
| | CGGTCCTCGGAGCAGTGAGGGGCCGCTCTCCTTCCCAGTCCTGGTCTCCTGCGCCTACCAGGTGGCCCGA | |
| | GGCATGCAGTATCTGGAGTCCCGGAAGTGTATCCACCGGGACCTGGCTGCCCGCAATGTGCTGGTGACTG | |
| | AGGACAATGTGATGAAGATTGCTGACTTTGGGCTGGCCCGCGGCGTCCACCACATTGACTACTATAAGAA | |
| | AACCAGCAACGGCCGCCTGCCTGTGAAGTGGATGGCGCCCGAGGCCTTGTTTGACCGGGTGTACACACAC | |
| | CAGAGTGACGTGTGGTCTTTTGGGATCCTGCTATGGGAGATCTTCACCCTCGGGGGCTCCCCGTATCCTG | |
| | GCATCCCGGTGGAGGAGCTGTTCTCGCTGCTGCGGGAGGGACATCGGATGGACCGACCCCCACACTGCCC | |
| | CCCAGAGCTGTACGGGCTGATGCGTGAGTGCTGGCACGCAGCGCCCTCCCAGAGGCCTACCTTCAAGCAG | |
| | CTGGTGGAGGCGCTGGACAAGGTCCTGCTGGCCGTCTCTGAGGAGTACCTCGACCTCCGCCTGACCTTCG | |
| | GACCCTATTCCCCCTCTGGTGGGGACGCCAGCAGCACCTGCTCCTCCAGCGATTCTGTCTTCAGCCACGA | |
| | CCCCCTGCCATTGGGATCCAGCTCCTTCCCCTTCGGGTCTGGGGTGCAGACATGAGCAAGGCTCAAGGCT | |
| | GTGCAGGCACATAGGCTGGTGGCCTTGGGCCTTGGGGCTCAGCCACAGCCTGACACAGTGCTCGACCTTG | |
| | ATAGCATGGGGCCCCTGGCCCAGAGTTGCTGTGCCGTGTCCAAGGGCCGTGCCCTTGCCCTTGGAGCTGC | |
| | CGTGCCTGTGTCCTGATGGCCCAAATGTCAGGGTTCTGCTCGGCTTCTTGGACCTTGGCGCTTAGTCCCC | |
| | ATCCCGGGTTTGGCTGAGCCTGGCTGGAGAGCTGCTATGCTAAACCTCCTGCCTCCCAATACCAGCAGGA | |
| | GGTTCTGGGCCTCTGAACCCCCTTTCCCCACACCTCCCCCTGCTGCTGCTGCCCCAGCGTCTTGACGGGA | |
| | GCATTGGCCCCTGAGCCCAGAGAAGCTGGAAGCCTGCCGAAAACAGGAGCAAATGGCGTTTTATAAATTA | |
| | TTTTTTTGAAAT | |
| FOXA1 | TAAGATCCACATCAGCTCAACTGCACTTGCCTCGCAGAGGCAGCCCGCTCACTTCCCGCGGAGGCGCTCC | 233 |
| NM_004496 | CCGGCGCCGCGCTCCGCGGCAGCCGCCTGCCCCCGGCGCTGCCCCCGCCCGCCGCGCCGCCGCCGCCGCC | |
| | GCGCACGCCGCGCCCCGCAGCTCTGGGCTTCCTCTTCGCCCGGGTGGCGTTGGGCCCGCGCGGGCGCTCG | |
| | GGTGACTGCAGCTGCTCAGCTCCCCTCCCCCGCCCCGCGCCGCGCGGCCGCCCGTCGCTTCGCACAGGGC | |
| | TGGATGGTTGTATTGGGCAGGGTGGCTCCAGGATGTTAGGAACTGTGAAGATGGAAGGGCATGAAACCAG | |
| | CGACTGGAACAGCTACTACGCAGACACGCAGGAGGCCTACTCCTCCGTCCCGGTCAGCAACATGAACTCA | |
| | GGCCTGGGCTCCATGAACTCCATGAACACCTACATGACCATGAACACCATGACTACGAGCGGCAACATGA | |
| | CCCCGGCGTCCTTCAACATGTCCTATGCCAACCCGGGCCTAGGGGCCGGCCTGAGTCCCGGCGCAGTAGC | |
| | CGGCATGCCGGGGGGCTCGGCGGGCGCCATGAACAGCATGACTGCGGCCGGCGTGACGGCCATGGGTACG | |
| | GCGCTGAGCCCGAGCGGCATGGGCGCCATGGGTGCGCAGCAGGCGGCCTCCATGAATGGCCTGGGCCCCT | |
| | ACGCGGCCGCCATGAACCCGTGCATGAGCCCCATGGCGTACGCGCCGTCCAACCTGGGCCGCAGCCGCGC | |
| | GGGCGGCGGCGGCGACGCCAAGACGTTCAAGCGCAGCTACCCGCACGCCAAGCCGCCCTACTCGTACATC | |
| | TCGCTCATCACCATGGCCATCCAGCAGGCGCCCAGCAAGATGCTCACGCTGAGCGAGATCTACCAGTGGA | |
| | TCATGGACCTCTTCCCCTATTACCGGCAGAACCAGCAGCGCTGGCAGAACTCCATCCGCCACTCGCTGTC | |
| | CTTCAATGACTGCTTCGTCAAGGTGGCACGCTCCCCGGACAAGCCGGGCAAGGGCTCCTACTGGACGCTG | |
| | CACCCGGACTCCGGCAACATGTTCGAGAACGGCTGCTACTTGCGCCGCCAGAAGCGCTTCAAGTGCGAGA | |
| | AGCAGCCGGGGGCCGGCGGCGGGGGCGGGAGCGGAAGCGGGGGCAGCGGCGCCAAGGGCGGCCCTGAGAG | |
| | CCGCAAGGACCCCTCTGGCGCCTCTAACCCCAGCGCCGACTCGCCCCTCCATCGGGGTGTGCACGGGAAG | |
| | ACCGGCCAGCTAGAGGGCGCGCCGGCCCCCGGGCCCGCCGCCAGCCCCCAGACTCTGGACCACAGTGGGG | |
| | CGACGGCGACAGGGGGCGCCTCGGAGTTGAAGACTCCAGCCTCCTCAACTGCGCCCCCCATAAGCTCCGG | |
| | GCCCGGGGCGCTGGCCTCTGTGCCCGCCTCTCACCCGGCACACGGCTTGGCACCCCACGAGTCCCAGCTG | |
| | CACCTGAAAGGGGACCCCCACTACTCCTTCAACCACCCGTTCTCCATCAACAACCTCATGTCCTCCTCGG | |
| | AGCAGCAGCATAAGCTGGACTTCAAGGCATACGAACAGGCACTGCAATACTCGCCTTACGGCTCTACGTT | |
| | GCCCGCCAGCCTGCCTCTAGGCAGCGCCTCGGTGACCACCAGGAGCCCCATCGAGCCCTCAGCCCTGGAG | |
| | CCGGCGTACTACCAAGGTGTGTATTCCAGACCCGTCCTAAACACTTCCTAGCTCCCGGGACTGGGGGGTT | |
| | TGTCTGGCATAGCCATGCTGGTAGCAAGAGAGAAAAAATCAACAGCAAACAAAACCACACAAACCAAACC | |
| | GTCAACAGCATAATAAAATCCCAACAACTATTTTTATTTCATTTTTCATGCACAACCTTTCCCCCAGTGC | |
| | AAAAGACTGTTACTTTATTATTGTATTCAAAATTCATTGTGTATATTACTACAAAGACAACCCCAAACCA | |
| | ATTTTTTTCCTGCGAAGTTTAATGATCCACAAGTGTATATATGAAATTCTCCTCCTTCCTTGCCCCCCTC | |
| | TCTTTCTTCCCTCTTTCCCCTCCAGACATTCTAGTTTGTGGAGGGTTATTTAAAAAAACAAAAAAGGAAG | |
| | ATGGTCAAGTTTGTAAAATATTTGTTTGTGCTTTTTCCCCCTCCTTACCTGACCCCCTACGAGTTTACAG | |
| | GTCTGTGGCAATACTCTTAACCATAAGAATTGAAATGGTGAAGAAACAAGTATACACTAGAGGCTCTTAA | |
| | AAGTATTGAAAGACAATACTGCTGTTATATAGCAAGACATAAACAGATTATAAACATCAGAGCCATTTGC | |
| | TTCTCAGTTTACATTTCTGATACATGCAGATAGCAGATGTCTTTAAATGAAATACATGTATATTGTGTAT | |
| | GGACTTAATTATGCACATGCTCAGATGTGTAGACATCCTCCGTATATTTACATAACATATAGAGGTAATA | |
| | GATAGGTGATATACATGATACATTCTCAAGAGTTGCTTGACCGAAAGTTACAAGGACCCCAACCCCTTTG | |
| | TCCTCTCTACCCACAGATGGCCCTGGGAATCAATTCCTCAGGAATTGCCCTCAAGAACTCTGCTTCTTGC | |
| | TTTGCAGAGTGCCATGGTCATGTCATTCTGAGGTCACATAACACATAAAATTAGTTTCTATGAGTGTATA | |
| | CCATTTAAAGAATTTTTTTTTCAGTAAAAGGGAATATTACAATGTTGGAGGAGAGATAAGTTATAGGGAG | |
| | CTGGATTTCAAAACGTGGTCCAAGATTCAAAAATCCTATTGATAGTGGCCATTTTAATCATTGCCATCGT | |
| | GTGCTTGTTTCATCCAGTGTTATGCACTTTCCACAGTTGGACATGGTGTTAGTATAGCCAGACGGGTTTC | |
| | ATTATTATTTCTCTTTGCTTTCTCAATGTTAATTTATTGCATGGTTTATTCTTTTTCTTTACAGCTGAAA | |
| | TTGCTTTAAATGATGGTTAAAATTACAAATTAAATTGTTAATTTTTATCAATGTGATTGTAATTAAAAAT | |
| | ATTTTGATTTAAATAACAAAAATAATACCAGATTTTAAGCCGTGGAAAATGTTCTTGATCATTTGCAGTT | |
| | AAGGACTTTAAATAAATCAAATGTTAACAAAAAAAAAAAAAAAA | |
| FOXC1 | ATGCAGGCGCGCTACTCCGTGTCCAGCCCCAACTCCCTGGGAGTGGTGCCCTACCTCGGCGGCGAGCAGA | 234 |
| NM_001453 | GCTACTACCGCGCGGCGGCCGCGGCGGCCGGGGGCGGCTACACCGCCATGCCGGCCCCCATGAGCGTGTA | |
| | CTCGCACCCTGCGCACGCCGAGCAGTACCCGGGCGGCATGGCCCGCGCCTACGGGCCCTACACGCCGCAG | |
| | CCGCAGCCCAAGGACATGGTGAAGCCGCCCTATAGCTACATCGCGCTCATCACCATGGCCATCCAGAACG | |
| | CCCCGGACAAGAAGATCACCCTGAACGGCATCTACCAGTTCATCATGGACCGCTTCCCCTTCTACCGGGA | |
| | CAACAAGCAGGGCTGGCAGAACAGCATCCGCCACAACCTCTCGCTCAACGAGTGCTTCGTCAAGGTGCCG | |
| | CGCGACGACAAGAAGCCGGGCAAGGGCAGCTACTGGACGCTGGACCCGGACTCCTACAACATGTTCGAGA | |
| | ACGGCAGCTTCCTGCGGCGGCGGCGGCGCTTCAAGAAGAAGGACGCGGTGAAGGACAAGGAGGAGAAGGA | |
| | CAGGCTGCACCTCAAGGAGCCGCCCCCGCCCGGCCGCCAGCCCCCGCCCGCGCCGCCGGAGCAGGCCGAC | |
| | GGCAACGCGCCCGGTCCGCAGCCGCCGCCCGTGCGCATCCAGGACATCAAGACCGAGAACGGTACGTGCC | |
| | CCTCGCCGCCCCAGCCCCTGTCCCCGGCCGCCGCCCTGGGCAGCGGCAGCGCCGCCGCGGTGCCCAAGAT | |
| | CGAGAGCCCCGACAGCAGCAGCAGCAGCCTGTCCAGCGGGAGCAGCCCCCCGGGCAGCCTGCCGTCGGCG | |
| | CGGCCGCTCAGCCTGGACGGTGCGGATTCCGCGCCGCCGCCGCCCGCGCCCTCCGCCCCGCCGCCGCACC | |
| | ATAGCCAGGGCTTCAGCGTGGACAACATCATGACGTCGCTGCGGGGGTCGCCGCAGAGCGCGGCCGCGGA | |
| | GCTCAGCTCCGGCCTTCTGGCCTCGGCGGCCGCGTCCTCGCGCGCGGGGATCGCACCCCCGCTGGCGCTC | |
| | GGCGCCTACTCGCCCGGCCAGAGCTCCCTCTACAGCTCCCCCTGCAGCCAGACCTCCAGCGCGGGCAGCT | |
| | CGGGCGGCGGCGGCGGCGGCGCGGGGGCCGCGGGGGGCGCGGGCGGCGCCGGGACCTACCACTGCAACCT | |
| | GCAAGCCATGAGCCTGTACGCGGCCGGCGAGCGCGGGGGCCACTTGCAGGGCGCGCCCGGGGGCGCGGGC | |
| | GGCTCGGCCGTGGACGACCCCCTGCCCGACTACTCTCTGCCTCCGGTCACCAGCAGCAGCTCGTCGTCCC | |
| | TGAGTCACGGCGGCGGCGGCGGCGGCGGCGGGGGAGGCCAGGAGGCCGGCCACCACCCTGCGGCCCACCA | |
| | AGGCCGCCTCACCTCGTGGTACCTGAACCAGGCGGGCGGAGACCTGGGCCACTTGGCGAGCGCGGCGGCG | |
| | GCGGCGGCGGCCGCAGGCTACCCGGGCCAGCAGCAGAACTTCCACTCGGTGCGGGAGATGTTCGAGTCAC | |
| | AGAGGATCGGCTTGAACAACTCTCCAGTGAACGGGAATAGTAGCTGTCAAATGGCCTTCCCTTCCAGCCA | |
| | GTCTCTGTACCGCACGTCCGGAGCTTTCGTCTACGACTGTAGCAAGTTTTGACACACCCTCAAAGCCGAA | |
| | CTAAATCGAACCCCAAAGCAGGAAAAGCTAAAGGAACCCATCAAGGCAAAATCGAAACTAAAAAAAAAAA | |
| | ATCCAATTAAAAAAAACCCCTGAGAATATTCACCACACCAGCGAACAGAATATCCCTCCAAAAATTCAGC | |
| | TCACCAGCACCAGCACGAAGAAAACTCTATTTTCTTAACCGATTAATTCAGAGCCACCTCCACTTTGCCT | |
| | TGTCTAAATAAACAAACCCGTAAACTGTTTTATACAGAGACAGCAAAATCTTGGTTTATTAAAGGACAGT | |
| | GTTACTCCAGATAACACGTAAGTTTCTTCTTGCTTTTCAGAGACCTGCTTTCCCCTCCTCCCGTCTCCCC | |
| | TCTCTTGCCTTCTTCCTTGCCTCTCACCTGTAAGATATTATTTTATCCTATGTTGAAGGGAGGGGGAAAG | |
| | TCCCCGTTTATGAAAGTCGCTTTCTTTTTATTCATGGACTTGTTTTAAAATGTAAATTGCAACATAGTAA | |
| | TTTATTTTTAATTTGTAGTTGGATGTCGTGGACCAAACGCCAGAAAGTGTTCCCAAAACCTGACGTTAAA | |
| | TTGCCTGAAACTTTAAATTGTGCTTTTTTTCTCATTATAAAAAGGGAAACTGTATTAATCTTATTCTATC | |
| | CTCTTTTCTTTCTTTTTGTTGAACATATTCATTGTTTGTTTATTAATAAATTACCATTCAGTTTGAATGA | |
| | GACCTATATGTCTGGATACTTTAATAGAGCTTTAATTATTACGAAAAAAGATTTCAGAGATAAAACACTA | |
| | GAAGTTACCTATTCTCCACCTAAATCTCTGAAAAATGGAGAAACCCTCTGACTAGTCCATGTCAAATTTT | |
| | ACTAAAAGTCTTTTTGTTTAGATTTATTTTCCTGCAGCATCTTCTGCAAAATGTACTATATAGTCAGCTT | |
| | GCTTTGAGGCTAGTAAAAAGATATTTTTCTAAACAGATTGGAGTTGGCATATAAACAAATACGTTTTCTC | |
| | ACTAATGACAGTCCATGATTCGGAAATTTTAAGCCCATGAATCAGCCGCGGTCTTACCACGGTGATGCCT | |
| | GTGTGCCGAGAGATGGGACTGTGCGGCCAGATATGCACAGATAAATATTTGGCTTGTGTATTCCATATAA | |
| | AATTGCAGTGCATATTATACATCCCTGTGAGCCAGATGCTGAATAGATATTTTCCTATTATTTCAGTCCT | |
| | TTATAAAAGGAAAAATAAACCAGTTTTTAAATGTATGTATATAATTCTCCCCCATTTACAATCCTTCATG | |
| | TATTACATAGAAGGATTGCTTTTTTAAAAATATACTGCGGGTTGGAAAGGGATATTTAATCTTTGAGAAA | |
| | CTATTTTAGAAAATATGTTTGTAGAACAATTATTTTTGAAAAAGATTTAAAGCAATAACAAGAAGGAAGG | |
| | CGAGAGGAGCAGAACATTTTGGTCTAGGGTGGTTTCTTTTTAAACCATTTTTTCTTGTTAATTTACAGTT | |
| | AAACCTAGGGGACAATCCGGATTGGCCCTCCCCCTTTTGTAAATAACCCAGGAAATGTAATAAATTCATT | |
| | ATCTTAGGGTGATCTGCCCTGCCAATCAGACTTTGGGGAGATGGCGATTTGATTACAGACGTTCGGGGGG | |
| | GTGGGGGGCTTGCAGTTTGTTTTGGAGATAATACAGTTTCCTGCTATCTGCCGCTCCTATCTAGAGGCAA | |
| | CACTTAAGCAGTAATTGCTGTTGCTTGTTGTCAAAATTTGATCATTGTTAAAGGATTGCTGCAAATAAAT | |
| | ACACTTTAATTTCAGTCAAAAA | |
| GPR160 | GTGGCCTCGAGGTGGTGGCAGGGCCGCCCCCTGCAGTCCGGAGACGAACGCACGGACCGGGCCTCCGGAG | 235 |
| AJ249248 | GCAGGTTCGGCTGGAAGGAACCGCTCTCGCTTCGTCCTACACTTGCGCAAATGTCTCCGAGCTTACTCAC | |
| | ATAGCATATTGGTATATCAAAATGAAATGCAAGGAACCAAAAATAACATAATTGAAGGCAGTAAAAGTGA | |
| | AATTAAATAGGAAGATCATCAGTCAAGGAAGACCCACTGGAGAGGACAGAAAATGAAGCAGTGTTTTATC | |
| | ATGTGTATTTCAGCAGGTCTTCTTGAAATTTAACTAAAAATATGACTGCTCTCTCTTCAGAGAACTGCTC | |
| | TTTTCAGTACCAGTTACGTCAAACAAACCAGCCCCTAGACGTTAACTATCTGCTATTCTTGATCATACTT | |
| | GGGAAAATATTATTAAATATCCTTACACTAGGAATGAGAAGAAAAAACACCTGTCAAAATTTTATGGAAT | |
| | ATTTTTGCATTTCACTAGCATTCGTTGATCTTTTACTTTTGGTAAACATTTCCATTATATTGTATTTCAG | |
| | GGATTTTGTACTTTTAAGCATTAGGTTCACTAAATACCACATCTGCCTATTTACTCAAATTATTTCCTTT | |
| | ACTTATGGCTTTTTGCATTATCCAGTTTTCCTGACAGCTTGTATAGATTATTGCCTGAATTTCTCTAAAA | |
| | CAACCAAGCTTTCATTTAAGTGTCAAAAATTATTTTATTTCTTTACAGTAATTTTAATTTGGATTTCAGT | |
| | CCTTGCTTATGTTTTGGGAGACCCAGCCATCTACCAAAGCCTGAAGGCACAGAATGCTTATTCTCGTCAC | |
| | TGTCCTTTCTATGTCAGCATTCAGAGTTACTGGCTGTCATTTTTCATGGTGATGATTTTATTTGTAGCTT | |
| | TCATAACCTGTTGGGAAGAAGTTACTACTTTGGTACAGGCTATCAGGATAACTTCCTATATGAATGAAAC | |
| | TATCTTATATTTTCCTTTTTCATCCCACTCCAGTTATACTGTGAGATCTAAAAAAATATTCTTATCCAAG | |
| | CTCATTGTCTGTTTTCTCAGTACCTGGTTACCATTTGTACTACTTCAGGTAATCATTGTTTTACTTAAAG | |
| | TTCAGATTCCAGCATATATTGAGATGAATATTCCCTGGTTATACTTTGTCAATAGTTTTCTCATTGCTAC | |
| | AGTGTATTGGTTTAATTGTCACAAGCTTAATTTAAAAGACATTGGATTACCTTTGGATCCATTTGTCAAC | |
| | TGGAAGTGCTGCTTCATTCCACTTACAATTCCTAATCTTGAGCAAATTGAAAAGCCTATATCAATAATGA | |
| | TTTGTTAATATTATTAATTAAAAGTTACAGCTGTCATAAGATCATAATTTTATGAACAGAAAGAACTCAG | |
| | GACATATTAAAAAATAAACTGAACTAAAACAACTTTTGCCCCCTGACTGATAGCATTTCAGAATGTGTCT | |
| | TTTGAAGGGCTATACCAGTTATTAAATAGTGTTTTATTTTAAAAACAAAATAATTCCAAGAAGTTTTTAT | |
| | AGTTATTCAGGGACACTATATTACAAATATTACTTTGTTATTAACACAAAAAGTGATAAGAGTTAACATT | |
| | TGGCTATACTGATGTTTGTGTTACTCAAAAAAACTACTGGATGCAAACTGTTATGTAAATCTGAGATTTC | |
| | ACTGACAACTTTAAGATATCAACCTAAACATTTTTATTAAATGTTCAAATGTAAGCAAGAAAAAAAAAA | |
| GRB7 | ACCCGCCCCCATCTGCCCAAGATAATTTTAGTTTCCTTGGGCCTGGAATCTGGACACACAGGGCTCCCCC | 236 |
| NM_005310 | CCGCCTCTGACTTCTCTGTCCGAAGTCGGGACACCCTCCTACCACCTGTAGAGAAGCGGGAGTGGATCTG | |
| | AAATAAAATCCAGGAATCTGGGGGTTCCTAGACGGAGCCAGACTTCGGAACGGGTGTCCTGCTACTCCTG | |
| | CTGGGGCTCCTCCAGGACAAGGGCACACAACTGGTTCCGTTAAGCCCCTCTCTCGCTCAGACGCCATGGA | |
| | GCTGGATCTGTCTCCACCTCATCTTAGCAGCTCTCCGGAAGACCTTTGCCCAGCCCCTGGGACCCCTCCT | |
| | GGGACTCCCCGGCCCCCTGATACCCCTCTGCCTGAGGAGGTAAAGAGGTCCCAGCCTCTCCTCATCCCAA | |
| | CCACCGGCAGGAAACTTCGAGAGGAGGAGAGGCGTGCCACCTCCCTCCCCTCTATCCCCAACCCCTTCCC | |
| | TGAGCTCTGCAGTCCTCCCTCACAGAGCCCAATTCTCGGGGGCCCCTCCAGTGCAAGGGGGCTGCTCCCC | |
| | CGCGATGCCAGCCGCCCCCATGTAGTAAAGGTGTACAGTGAGGATGGGGCCTGCAGGTCTGTGGAGGTGG | |
| | CAGCAGGTGCCACAGCTCGCCACGTGTGTGAAATGCTGGTGCAGCGAGCTCACGCCTTGAGCGACGAGAC | |
| | CTGGGGGCTGGTGGAGTGCCACCCCCACCTAGCACTGGAGCGGGGTTTGGAGGACCACGAGTCCGTGGTG | |
| | GAAGTGCAGGCTGCCTGGCCCGTGGGCGGAGATAGCCGCTTCGTCTTCCGGAAAAACTTCGCCAAGTACG | |
| | AACTGTTCAAGAGCTCCCCACACTCCCTGTTCCCAGAAAAAATGGTCTCCAGCTGTCTCGATGCACACAC | |
| | TGGTATATCCCATGAAGACCTCATCCAGAACTTCCTGAATGCTGGCAGCTTTCCTGAGATCCAGGGCTTT | |
| | CTGCAGCTGCGGGGTTCAGGACGGAAGCTTTGGAAACGCTTTTTCTGCTTCTTGCGCCGATCTGGCCTCT | |
| | ATTACTCCACCAAGGGCACCTCTAAGGATCCGAGGCACCTGCAGTACGTGGCAGATGTGAACGAGTCCAA | |
| | CGTGTACGTGGTGACGCAGGGCCGCAAGCTCTACGGGATGCCCACTGACTTCGGTTTCTGTGTCAAGCCC | |
| | AACAAGCTTCGAAATGGCCACAAGGGGCTTCGGATCTTCTGCAGTGAAGATGAGCAGAGCCGCACCTGCT | |
| | GGCTGGCTGCCTTCCGCCTCTTCAAGTACGGGGTGCAGCTGTACAAGAATTACCAGCAGGCACAGTCTCG | |
| | CCATCTGCATCCATCTTGTTTGGGCTCCCCACCCTTGAGAAGTGCCTCAGATAATACCCTGGTGGCCATG | |
| | GACTTCTCTGGCCATGCTGGGCGTGTCATTGAGAACCCCCGGGAGGCTCTGAGTGTGGCCCTGGAGGAGG | |
| | CCCAGGCCTGGAGGAAGAAGACAAACCACCGCCTCAGCCTGCCCATGCCAGCCTCCGGCACGAGCCTCAG | |
| | TGCAGCCATCCACCGCACCCAACTCTGGTTCCACGGGCGCATTTCCCGTGAGGAGAGCCAGCGGCTTATT | |
| | GGACAGCAGGGCTTGGTAGACGGCCTGTTCCTGGTCCGGGAGAGTCAGCGGAACCCCCAGGGCTTTGTCC | |
| | TCTCTTTGTGCCACCTGCAGAAAGTGAAGCATTATCTCATCCTGCCGAGCGAGGAGGAGGGCCGCCTGTA | |
| | CTTCAGCATGGATGATGGCCAGACCCGCTTCACTGACCTGCTGCAGCTCGTGGAGTTCCACCAGCTGAAC | |
| | CGCGGCATCCTGCCGTGCTTGCTGCGCCATTGCTGCACGCGGGTGGCCCTCTGACCAGGCCGTGGACTGG | |
| | CTCATGCCTCAGCCCGCCTTCAGGCTGCCCGCCGCCCCTCCACCCATCCAGTGGACTCTGGGGCGCGGCC | |
| | ACAGGGGACGGGATGAGGAGCGGGAGGGTTCCGCCACTCCAGTTTTCTCCTCTGCTTCTTTGCCTCCCTC | |
| | AGATAGAAAACAGCCCCCACTCCAGTCCACTCCTGACCCCTCTCCTCAAGGGAAGGCCTTGGGTGGCCCC | |
| | CTCTCCTTCTCCTAGCTCTGGAGGTGCTGCTCTAGGGCAGGGAATTATGGGAGAAGTGGGGGCAGCCCAG | |
| | GCGGTTTCACGCCCCACACTTTGTACAGACCGAGAGGCCAGTTGATCTGCTCTGTTTTATACTAGTGACA | |
| | ATAAAGATTATTTTTTGATACAAAAAAAAAAAAAAAAAAAAAAAA | |
| HSPC150 | AGTCAGAGGTCGCGCAGGCGCTGGTACCCCGTTGGTCCGCGCGTTGCTGCGTTGTGAGGGGTGTCAGCTC | 237 |
| (UBE2T) | AGTGCATCCCAGGCAGCTCTTAGTGTGGAGCAGTGAACTGTGTGTGGTTCCTTCTACTTGGGGATCATGC | |
| NM_014176 | AGAGAGCTTCACGTCTGAAGAGAGAGCTGCACATGTTAGCCACAGAGCCACCCCCAGGCATCACATGTTG | |
| | GCAAGATAAAGACCAAATGGATGACCTGCGAGCTCAAATATTAGGTGGAGCCAACACACCTTATGAGAAA | |
| | GGTGTTTTTAAGCTAGAAGTTATCATTCCTGAGAGGTACCCATTTGAACCTCCTCAGATCCGATTTCTCA | |
| | CTCCAATTTATCATCCAAACATTGATTCTGCTGGAAGGATTTGTCTGGATGTTCTCAAATTGCCACCAAA | |
| | AGGTGCTTGGAGACCATCCCTCAACATCGCAACTGTGTTGACCTCTATTCAGCTGCTCATGTCAGAACCC | |
| | AACCCTGATGACCCGCTCATGGCTGACATATCCTCAGAATTTAAATATAATAAGCCAGCCTTCCTCAAGA | |
| | ATGCCAGACAGTGGACAGAGAAGCATGCAAGACAGAAACAAAAGGCTGATGAGGAAGAGATGCTTGATAA | |
| | TCTACCAGAGGCTGGTGACTCCAGAGTACACAACTCAACACAGAAAAGGAAGGCCAGTCAGCTAGTAGGC | |
| | ATAGAAAAGAAATTTCATCCTGATGTTTAGGGGACTTGTCCTGGTTCATCTTAGTTAATGTGTTCTTTGC | |
| | CAAGGTGATCTAAGTTGCCTACCTTGAATTTTTTTTTAAATATATTTGATGACATAATTTTTGTGTAGTT | |
| | TATTTATCTTGTACATATGTATTTTGAAATCTTTTAAACCTGAAAAATAAATAGTCATTTAATGTTGAAA | |
| | AAAAAAAAAAAAAAAAAAAAAAAAA | |
| KIF2C | ACGCTTGCGCGCGGGATTTAAACTGCGGCGGTTTACGCGGCGTTAAGACTTCGTAGGGTTAGCGAAATTG | 238 |
| NM_006845 | AGGTTTCTTGGTATTGCGCGTTTCTCTTCCTTGCTGACTCTCCGAATGGCCATGGACTCGTCGCTTCAGG | |
| | CCCGCCTGTTTCCCGGTCTCGCTATCAAGATCCAACGCAGTAATGGTTTAATTCACAGTGCCAATGTAAG | |
| | GACTGTGAACTTGGAGAAATCCTGTGTTTCAGTGGAATGGGCAGAAGGAGGTGCCACAAAGGGCAAAGAG | |
| | ATTGATTTTGATGATGTGGCTGCAATAAACCCAGAACTCTTACAGCTTCTTCCCTTACATCCGAAGGACA | |
| | ATCTGCCCTTGCAGGAAAATGTAACAATCCAGAAACAAAAACGGAGATCCGTCAACTCCAAAATTCCTGC | |
| | TCCAAAAGAAAGTCTTCGAAGCCGCTCCACTCGCATGTCCACTGTCTCAGAGCTTCGCATCACGGCTCAG | |
| | GAGAATGACATGGAGGTGGAGCTGCCTGCAGCTGCAAACTCCCGCAAGCAGTTTTCAGTTCCTCCTGCCC | |
| | CCACTAGGCCTTCCTGCCCTGCAGTGGCTGAAATACCATTGAGGATGGTCAGCGAGGAGATGGAAGAGCA | |
| | AGTCCATTCCATCCGAGGCAGCTCTTCTGCAAACCCTGTGAACTCAGTTCGGAGGAAATCATGTCTTGTG | |
| | AAGGAAGTGGAAAAAATGAAGAACAAGCGAGAAGAGAAGAAGGCCCAGAACTCTGAAATGAGAATGAAGA | |
| | GAGCTCAGGAGTATGACAGTAGTTTTCCAAACTGGGAATTTGCCCGAATGATTAAAGAATTTCGGGCTAC | |
| | TTTGGAATGTCATCCACTTACTATGACTGATCCTATCGAAGAGCACAGAATATGTGTCTGTGTTAGGAAA | |
| | CGCCCACTGAATAAGCAAGAATTGGCCAAGAAAGAAATTGATGTGATTTCCATTCCTAGCAAGTGTCTCC | |
| | TCTTGGTACATGAACCCAAGTTGAAAGTGGACTTAACAAAGTATCTGGAGAACCAAGCATTCTGCTTTGA | |
| | CTTTGCATTTGATGAAACAGCTTCGAATGAAGTTGTCTACAGGTTCACAGCAAGGCCACTGGTACAGACA | |
| | ATCTTTGAAGGTGGAAAAGCAACTTGTTTTGCATATGGCCAGACAGGAAGTGGCAAGACACATACTATGG | |
| | GCGGAGACCTCTCTGGGAAAGCCCAGAATGCATCCAAAGGGATCTATGCCATGGCCTCCCGGGACGTCTT | |
| | CCTCCTGAAGAATCAACCCTGCTACCGGAAGTTGGGCCTGGAAGTCTATGTGACATTCTTCGAGATCTAC | |
| | AATGGGAAGCTGTTTGACCTGCTCAACAAGAAGGCCAAGCTGCGCGTGCTGGAGGACGGCAAGCAACAGG | |
| | TGCAAGTGGTGGGGCTGCAGGAGCATCTGGTTAACTCTGCTGATGATGTCATCAAGATGATCGACATGGG | |
| | CAGCGCCTGCAGAACCTCTGGGCAGACATTTGCCAACTCCAATTCCTCCCGCTCCCACGCGTGCTTCCAA | |
| | ATTATTCTTCGAGCTAAAGGGAGAATGCATGGCAAGTTCTCTTTGGTAGATCTGGCAGGGAATGAGCGAG | |
| | GCGCGGACACTTCCAGTGCTGACCGGCAGACCCGCATGGAGGGCGCAGAAATCAACAAGAGTCTCTTAGC | |
| | CCTGAAGGAGTGCATCAGGGCCCTGGGACAGAACAAGGCTCACACCCCGTTCCGTGAGAGCAAGCTGACA | |
| | CAGGTGCTGAGGGACTCCTTCATTGGGGAGAACTCTAGGACTTGCATGATTGCCACGATCTCACCAGGCA | |
| | TAAGCTCCTGTGAATATACTTTAAACACCCTGAGATATGCAGACAGGGTCAAGGAGCTGAGCCCCCACAG | |
| | TGGGCCCAGTGGAGAGCAGTTGATTCAAATGGAAACAGAAGAGATGGAAGCCTGCTCTAACGGGGCGCTG | |
| | ATTCCAGGCAATTTATCCAAGGAAGAGGAGGAACTGTCTTCCCAGATGTCCAGCTTTAACGAAGCCATGA | |
| | CTCAGATCAGGGAGCTGGAGGAGAAGGCTATGGAAGAGCTCAAGGAGATCATACAGCAAGGACCAGACTG | |
| | GCTTGAGCTCTCTGAGATGACCGAGCAGCCAGACTATGACCTGGAGACCTTTGTGAACAAAGCGGAATCT | |
| | GCTCTGGCCCAGCAAGCCAAGCATTTCTCAGCCCTGCGAGATGTCATCAAGGCCTTGCGCCTGGCCATGC | |
| | AGCTGGAAGAGCAGGCTAGCAGACAAATAAGCAGCAAGAAACGGCCCCAGTGACGACTGCAAATAAAAAT | |
| | CTGTTTGGTTTGACACCCAGCCTCTTCCCTGGCCCTCCCCAGAGAACTTTGGGTACCTGGTGGGTCTAGG | |
| | CAGGGTCTGAGCTGGGACAGGTTCTGGTAAATGCCAAGTATGGGGGCATCTGGGCCCAGGGCAGCTGGGG | |
| | AGGGGGTCAGAGTGACATGGGACACTCCTTTTCTGTTCCTCAGTTGTCGCCCTCACGAGAGGAAGGAGCT | |
| | CTTAGTTACCCTTTTGTGTTGCCCTTCTTTCCATCAAGGGGAATGTTCTCAGCATAGAGCTTTCTCCGCA | |
| | GCATCCTGCCTGCGTGGACTGGCTGCTAATGGAGAGCTCCCTGGGGTTGTCCTGGCTCTGGGGAGAGAGA | |
| | CGGAGCCTTTAGTACAGCTATCTGCTGGCTCTAAACCTTCTACGCCTTTGGGCCGAGCACTGAATGTCTT | |
| | GTACTTTAAAAAAATGTTTCTGAGACCTCTTTCTACTTTACTGTCTCCCTAGAGATCCTAGAGGATCCCT | |
| | ACTGTTTTCTGTTTTATGTGTTTATACATTGTATGTAACAATAAAGAGAAAAAATAAATCAGCTGTTTAA | |
| | GTGTGTGGAAAAAAAAAAAAAAAAAA | |
| KNTC2 | ACTGCGCGCGTCGTGCGTAATGACGTCAGCGCCGGCGGAGAATTTCAAATTCGAACGGCTTTGGCGGGCC | 239 |
| NM_006101 | GAGGAAGGACCTGGTGTTTTGATGACCGCTGTCCTGTCTAGCAGATACTTGCACGGTTTACAGAAATTCG | |
| | GTCCCTGGGTCGTGTCAGGAAACTGGAAAAAAGGTCATAAGCATGAAGCGCAGTTCAGTTTCCAGCGGTG | |
| | GTGCTGGCCGCCTCTCCATGCAGGAGTTAAGATCCCAGGATGTAAATAAACAAGGCCTCTATACCCCTCA | |
| | AACCAAAGAGAAACCAACCTTTGGAAAGTTGAGTATAAACAAACCGACATCTGAAAGAAAAGTCTCGCTA | |
| | TTTGGCAAAAGAACTAGTGGACATGGATCCCGGAATAGTCAACTTGGTATATTTTCCAGTTCTGAGAAAA | |
| | TCAAGGACCCGAGACCACTTAATGACAAAGCATTCATTCAGCAGTGTATTCGACAACTCTGTGAGTTTCT | |
| | TACAGAAAATGGTTATGCACATAATGTGTCCATGAAATCTCTACAAGCTCCCTCTGTTAAAGACTTCCTG | |
| | AAGATCTTCACATTTCTTTATGGCTTCCTGTGCCCCTCATACGAACTTCCTGACACAAAGTTTGAAGAAG | |
| | AGGTTCCAAGAATCTTTAAAGACCTTGGGTATCCTTTTGCACTATCCAAAAGCTCCATGTACACAGTGGG | |
| | GGCTCCTCATACATGGCCTCACATTGTGGCAGCCTTAGTTTGGCTAATAGACTGCATCAAGATACATACT | |
| | GCCATGAAAGAAAGCTCACCTTTATTTGATGATGGGCAGCCTTGGGGAGAAGAAACTGAAGATGGAATTA | |
| | TGCATAATAAGTTGTTTTTGGACTACACCATAAAATGCTATGAGAGTTTTATGAGTGGTGCCGACAGCTT | |
| | TGATGAGATGAATGCAGAGCTGCAGTCAAAACTGAAGGATTTATTTAATGTGGATGCTTTTAAGCTGGAA | |
| | TCATTAGAAGCAAAAAACAGAGCATTGAATGAACAGATTGCAAGATTGGAACAAGAAAGAGAAAAAGAAC | |
| | CGAATCGTCTAGAGTCGTTGAGAAAACTGAAGGCTTCCTTACAAGGAGATGTTCAAAAGTATCAGGCATA | |
| | CATGAGCAATTTGGAGTCTCATTCAGCCATTCTTGACCAGAAATTAAATGGTCTCAATGAGGAAATTGCT | |
| | AGAGTAGAACTAGAATGTGAAACAATAAAACAGGAGAACACTCGACTACAGAATATCATTGACAACCAGA | |
| | AGTACTCAGTTGCAGACATTGAGCGAATAAATCATGAAAGAAATGAATTGCAGCAGACTATTAATAAATT | |
| | AACCAAGGACCTGGAAGCTGAACAACAGAAGTTGTGGAATGAGGAGTTAAAATATGCCAGAGGCAAAGAA | |
| | GCGATTGAAACACAATTAGCAGAGTATCACAAATTGGCTAGAAAATTAAAACTTATTCCTAAAGGTGCTG | |
| | AGAATTCCAAAGGTTATGACTTTGAAATTAAGTTTAATCCCGAGGCTGGTGCCAACTGCCTTGTCAAATA | |
| | CAGGGCTCAAGTTTATGTACCTCTTAAGGAACTCCTGAATGAAACTGAAGAAGAAATTAATAAAGCCCTA | |
| | AATAAAAAAATGGGTTTGGAGGATACTTTAGAACAATTGAATGCAATGATAACAGAAAGCAAGAGAAGTG | |
| | TGAGAACTCTGAAAGAAGAAGTTCAAAAGCTGGATGATCTTTACCAACAAAAAATTAAGGAAGCAGAGGA | |
| | AGAGGATGAAAAATGTGCCAGTGAGCTTGAGTCCTTGGAGAAACACAAGCACCTGCTAGAAAGTACTGTT | |
| | AACCAGGGGCTCAGTGAAGCTATGAATGAATTAGATGCTGTTCAGCGGGAATACCAACTAGTTGTGCAAA | |
| | CCACGACTGAAGAAAGACGAAAAGTGGGAAATAACTTGCAACGTCTGTTAGAGATGGTTGCTACACATGT | |
| | TGGGTCTGTAGAGAAACATCTTGAGGAGCAGATTGCTAAAGTTGATAGAGAATATGAAGAATGCATGTCA | |
| | GAAGATCTCTCGGAAAATATTAAAGAGATTAGAGATAAGTATGAGAAGAAAGCTACTCTAATTAAGTCTT | |
| | CTGAAGAATGAAGATAAAATGTTGATCATGTATATATATCCATAGTGAATAAAATTGTCTCAGTAAAGTG | |
| | TAAAAAAAAAAAAAAAAAAAAAAAAAAAAAAAAAAAAAA | |
| KRT14 | CTCCCTCCTCTGCACCATGACTACCTGCAGCCGCCAGTTCACCTCCTCCAGCTCCATGAAGGGCTCCTGC | 240 |
| BC042437 | GGCATCGGGGGCGGCATCGGGGGCGGCTCCAGCCGCATCTCCTCCGTCCTGGCCGGAGGGTCCTGCCGCG | |
| | CCCCCAGCACCTACGGGGGCGGCCTGTCTGTCTCATCCTCCCGCTTCTCCTCTGGGGGAGCCTATGGGTT | |
| | GGGGGGCGGCTATGGCGGTGGCTTCAGCAGCAGCAGCAGCAGCTTTGGTAGTGGCTTTGGGGGAGGATAT | |
| | GGTGGTGGCCTTGGTGCTGGCTTGGGTGGTGGCTTTGGTGGTGGCTTTGCTGGTGGTGATGGGCTTCTGG | |
| | TGGGCAGTGAGAAGGTGACCATGCAGAACCTCAACGACCGCCTGGCCTCCTACCTGGACAAGGTGCGTGC | |
| | TCTGGAGGAGGCCAACGCCGACCTGGAAGTGAAGATCCGTGACTGGTACCAGAGGCAGCGGCCTGCTGAG | |
| | ATCAAAGACTACAGTCCCTACTTCAAGACCATTGAGGACCTGAGGAACAAGATTCTCACAGCCACAGTGG | |
| | ACAATGCCAATGTCCTTCTGCAGATTGACAATGCCCGTCTGGCCGCGGATGACTTCCGCACCAAGTATGA | |
| | GACAGAGTTGAACCTGCGCATGAGTGTGGAAGCCGACATCAATGGCCTGCGCAGGGTGCTGGACGAACTG | |
| | ACCCTGGCCAGAGCTGACCTGGAGATGCAGATTGAGAGCCTGAAGGAGGAGCTGGCCTACCTGAAGAAGA | |
| | ACCACGAGGAGGAGATGAATGCCCTGAGAGGCCAGGTGGGTGGAGATGTCAATGTGGAGATGGACGCTGC | |
| | ACCTGGCGTGGACCTGAGCCGCATTCTGAACGAGATGCGTGACCAGTATGAGAAGATGGCAGAGAAGAAC | |
| | CGCAAGGATGCCGAGGAATGGTTCTTCACCAAGACAGAGGAGCTGAACCGCGAGGTGGCCACCAACAGCG | |
| | AGCTGGTGCAGAGCGGCAAGAGCGAGATCTCGGAGCTCCGGCGCACCATGCAGAACCTGGAGATTGAGCT | |
| | GCAGTCCCAGCTCAGCATGAAAGCATCCCTGGAGAACAGCCTGGAGGAGACCAAAGGTCGCTACTGCATG | |
| | CAGCTGGCCCAGATCCAGGAGATGATTGGCAGCGTGGAGGAGCAGCTGGCCCAGCTCCGCTGCGAGATGG | |
| | AGCAGCAGAACCAGGAGTACAAGATCCTGCTGGACGTGAAGACGCGGCTGGAGCAGGAGATCGCCACCTA | |
| | CCGCCGCCTGCTGGAGGGCGAGGACGCCCACCTCTCCTCCTCCCAGTTCTCCTCTGGATCGCAGTCATCC | |
| | AGAGATGTGACCTCCTCCAGCCGCCAAATCCGCACCAAGGTCATGGATGTGCACGATGGCAAGGTGGTGT | |
| | CCACCCACGAGCAGGTCCTTCGCACCAAGAACTGAGGCTGCCCAGCCCCGCTCAGGCCTAGGAGGCCCCC | |
| | CGTGTGGACACAGATCCCACTGGAAGATCCCCTCTCCTGCCCAAGCACTTCACAGCTGGACCCTGCTTCA | |
| | CCCTCACCCCCTCCTGGCAATCAATACAGCTTCATTATCTGAGTTGCATAAAAAAAAAAAAAAAAAAAAA | |
| | AAAAAAAAAAAAAAAAAAAAAAAAAAAAAAAAAAAAAAAAAAAAAAAAAAAAAAAAAAAAAAAAAAAAAA | |
| | AAAAAAAAAAAAAAAAAAAAAAAAAAAAAAAAAAAAAAAAAAAAAAAAAAAAAAAAAAAA | |
| KRT17 | CTCTTTTGCAGGGGCCGTTCCTCGGGGCATGACGCTGGCTCCTGCACAGATCCTGCTCCTCTGTGGCCTT | 241 |
| AK095281 | CCTGGGCTGCCCTCCCCTCCTCCGGGACTGCTCTGGACTGACACTGCTCAGGTTCGGATTCCCTCAAAGA | |
| | CTTTGGGAGACAAGACTTGGTCCCCCTTTTACAAACAAGGGAACGGAGGCTCTAGAACTGACTTCCTGAA | |
| | AGGCTTGGATCCAAAGCTCCCTCAGTTCAGCGGCCACGTCTATTTCCCTCAGACACAGGGATCCTTGAAC | |
| | CTGTGGGCTGTATCTCCCCGCGGACTTGGAAGAATCCCAAGAGAGTGGGGCTCCCACAGGCTGGAGTGCA | |
| | ATGGTGTGATCTCGGCTCACTGCAACCTCCACCTCCCAGGTTCAAGCTATTCTCCTGCCTCAGCCTCCTG | |
| | AGTAGCTGGGATTACAGATCCTGGTGGCTGTGGTCGGTAATTCCAGCTTCGTGCTGGCTACAGGTGGATG | |
| | ATGCCCACCTGGCTGCCGATGACCTCTGCACCAAGTGAGGCTGGGTCTCTGGAGCTGCCCCAGGGGCTGG | |
| | ACAAGCTGACCCTGGCCGGGGCCAACCTGGAGATGCAGATTGAGAACCTCAAGGAGGACCTGGTCTACCT | |
| | GAAGAAGAACCACAAGCAGGAAATGAACGTCCTTTGAGGTCAGGTGGATGAGGATGTCAGTGTGAAGATG | |
| | GACACTGTGCCTGGAGTGAACCTGAGCTGCATCCTGAATGAGATGCGTGACCAGGACAAGACATTGGTGG | |
| | AGAAGAGCTGCAAGGATGCCGAGGGCTGGTTCTTCAGCATGGTGGGTGGCCGTGCGTAAGCAGGTGTGTA | |
| | CACGTGTGGGCACATGTGCTGCATGCTGGTGCAGCTGGAGCACTGGCAGATCCACAGGCTGTCCCAGTTG | |
| | GAAGGACTTTTGGAAACCAGTTGGACCAGCCCCTCATGTTTTAGATGTAAAACGTGAGGCTCAGAGAGGA | |
| | CTCAAGCTCACACAGCCCTTCACTGTGGCCTGCAAAATAGATCCAGGTCTCTACAAGTCTGGTCTTGGGT | |
| | TTCCACCACAGCTGTTTACAGGATGTGCGTATTTGAATACATATGTATACCCTTGGCAAGCACAGGCTGA | |
| | GTATCTCCGGTATCCTAGGGACAGCAACAGGCGCAAAAGAATAACACCCAGTGCCTGTCTTTGAGGTGCT | |
| | GCAGTTCAGTAGGAAAAAGAAATGCAAATGACCGCAGAGCAGGCTGAATTCCTCCAAGTTCCAATGTGGG | |
| | TGCAGAGGCTCTCTGTGTGCAGAAAGAGGGGCTGAACTGCGAGGTGGCCACCAACACAGAGGCCCTGCAG | |
| | AGTGGCTGGATAGAGATATGGAGCTCTACGTCTCTGTGCAGAACCTGAGCCGTCCCAGCTCAGCAAGAAA | |
| | GCATCGCTGGAGGGCAGCCTGGTGGAGATGGAGGTGTGTTACAGGACCCTGCCGGCCCAGCTGCAGGGGC | |
| | TTAACAGAAGCATGGAGCAGCAGCTGTGCGAGCTCTGCTGCGACACGGAGCACCAGGACCACAAGCACAG | |
| | GTCCTTCTGGACGTGAAGACGTGGCTGGAGCAGGAGATCGCCACCTACCGCCGCTTGCTGGAGGTTGAGG | |
| | ACGCCCAGAGGTGATACTGACGATGCAGGCTGGAGTCTGGCTGAGGAGCCTTGAATGCCAAGTTAAAGCG | |
| | TCTGGACTAGATCACGTAGGCAATGGGGAGCCATGGAGGGATTTGGAGCAGGAGAGTGAAATGAACATCA | |
| | AGAGATTTTAGAACATTCACTCTGGCTGCAGAGGGAGAAATGGATCAGAGGGGTCAGGGCGGGGCCAGAG | |
| | AGATGTGTCAGGGGGCTGGAGCAGGGAGTCTGGCCAGAGAAGTCCCGTGCGGTGGTGGGTAGTGGGGCAG | |
| | GGGAAGGAAGGTGGTGCACGCAGAAGAGAGGTTATAGCTCAAAACAGCGGGACTGGATGCCTGGATCTCG | |
| | GGGTAAGCATGGCTCACAGTCAGGACTCAGTAAGTGTCGGGAGAACACATGAAGGAGCAGGCATTGATGG | |
| | CCCTGGGTTTCTGGTTCTGATGACTGTGTGAGTGGTGAAGAGCAAGGTGGGTGGTGGTTGGGTTTGCAGT | |
| | TGGGAAGGGTGATCAGGCCTTCAGCTGAGAGTGTCCCGGAGTCTCCATGCTTAGTCACACGTTGCAGCTT | |
| | TTTGCTCCCCGGAAATGGTGAAGTCCATCTATAGTCTAACAACAGTCTCTCCTGCTTTAATTGGGTCTAT | |
| | TTGTTGGGCCCTCTGGGTTATGGAAAAACCACTTGCTCAGCTTCTCCTTGTAAATTCCTGGTGAGTAGCC | |
| | ACAGAGTGCCGCCAGACCTACTGCTGTGCTGTTTCTTTTTCTTCTTCCTGCTGTGCTGAACCCCTGCCCT | |
| | TTCATTCTTGGGCCTGCGCTAATTTCTGTGCATTCCCAACTGTGATTTTTCACCAATTTAGGGGAACCTC | |
| | CTCTGCCAGGGCCTACTTCTCCCCAGCAGTGCTTGCAGGTGCCTGGGCTGGCTGGCATCCCTGGGCTGAT | |
| | GGGTGCTTCTCTCCCTGCAGGCTGGCCACTCAGTACTCCTTGTCCCTGGCCTCGCAGCCCACCCGGGAAG | |
| | CCACAGTGACCAGCCACCAGGTGTGCCATCGTGGAGGAAGTCCAGGTTGGAGAGGTGGTCTTCTTCTGTG | |
| | AGCAGGTCCACTTCTCCACCCACTGAGACCCCTTTCTGTCTGCGACAGCCCCACCTCGAGGGCCACGGCA | |
| | CAGCCATCAGCTCCAGCTCCCAGCATGCTACTGCCACGCCCCGAGTGTCCGTCTGGGCCCCGGTGCATGG | |
| | CCTGTTGTCTTTCTGTATCTACTTTCTGCAGCCCCTCACTGAGGAGGCCTCCTGGGTTTGTCCAGTGCCT | |
| | ACTATTAAAGCTTTGCTCCAAGTTC | |
| KRT5 | GCATCCTTTTTGGGCTGCTCACAGCCCCCAGCCTCTATGGTGAAGACATACTTGCTAGCAGCGTCACCAA | 242 |
| M21389 | CTTGCTGCCAAGAGATCAGTGCTGCAAGGCAAGGTTATTTCTAACTGAGCAGAGCCTGCCAGGAAGAAAG | |
| | CGTTTGCACCCCACACCACTGTGCAGGTGTGACCGGTGAGCTCACAGCTGCCCCCCAGGCATGCCCAGCC | |
| | CACTTAATCATTCACAGCTCGACAGCTCTCTCGCCCAGCCCAGTTCTGGAAGGGATAAAAAGGGGGCATC | |
| | ACCGTTCCTGGGTAACAGAGCCACCTTCTGCGTCCTGCTGAGCTCTGTTCTCTCCAGCACCTCCCAACCC | |
| | ACTAGTGCCTGGTTCTCTTGCTCCACCAGGAACAAGCCACCATGTCTCGCCAGTCAAGTGTGTCCTTCCG | |
| | GAGCGGGGGCAGTCGTAGCTTCAGCACCGCCTCTGCCATCACCCCGTCTGTCTCCCGCACCAGCTTCACC | |
| | TCCGTGTCCCGGTCCGGGGGTGGCGGTGGTGGTGGCTTCGGCAGGGTCAGCCTTGCGGGTGCTTGTGGAG | |
| | TGGGTGGCTATGGCAGCCGGAGCCTCTACAACCTGGGGGGCTCCAAGAGGATATCCATCAGCACTAGAGG | |
| | AGGCAGCTTCAGGAACCGGTTTGGTGCTGGTGCTGGAGGCGGCTATGGCTTTGGAGGTGGTGCCGGTAGT | |
| | GGATTTGGTTTCGGCGGTGGAGCTGGTGGTGGCTTTGGGCTCGGTGGCGGAGCTGGCTTTGGAGGTGGCT | |
| | TCGGTGGCCCTGGCTTTCCTGTCTGCCCTCCTGGAGGTATCCAAGAGGTCACTGTCAACCAGAGTCTCCT | |
| | GACTCCCCTCAACCTGCAAATCGACCCCAGCATCCAGAGGGTGAGGACCGAGGAGCGCGAGCAGATCAAG | |
| | ACCCTCAACAATAAGTTTGCCTCCTTCATCGACAAGGTGCGGTTCCTGGAGCAGCAGAACAAGGTTCTGG | |
| | ACACCAAGTGGACCCTGCTGCAGGAGCAGGGCACCAAGACTGTGAGGCAGAACCTGGAGCCGTTGTTCGA | |
| | GCAGTACATCAACAACCTCAGGAGGCAGCTGGACAGCATCGTGGGGGAACGGGGCCGCCTGGACTCAGAG | |
| | CTGAGAAACATGCAGGACCTGGTGGAAGACTTCAAGAACAAGTATGAGGATGAAATCAACAAGCGTACCA | |
| | CTGCTGAGAATGAGTTTGTGATGCTGAAGAAGGATGTAGATGCTGCCTACATGAACAAGGTGGAGCTGGA | |
| | GGCCAAGGTTGATGCACTGATGGATGAGATTAACTTCATGAAGATGTTCTTTGATGCGGAGCTGTCCCAG | |
| | ATGCAGACGCATGTCTCTGACACCTCAGTGGTCCTCTCCATGGACAACAACCGCAACCTGGACCTGGATA | |
| | GCATCATCGCTGAGGTCAAGGCCCAGTATGAGGAGATTGCCAACCGCAGCCGGACAGAAGCCGAGTCCTG | |
| | GTATCAGACCAAGTATGAGGAGCTGCAGCAGACAGCTGGCCGGCATGGCGATGACCTCCGCAACACCAAG | |
| | CATGAGATCACAGAGATGAACCGGATGATCCAGAGGCTGAGAGCCGAGATTGACAATGTCAAGAAACAGT | |
| | GCGCCAATCTGCAGAACGCCATTGCGGATGCCGAGCAGCGTGGGGAGCTGGCCCTCAAGGATGCCAGGAA | |
| | CAAGCTGGCCGAGCTGGAGGAGGCCCTGCAGAAGGCCAAGCAGGACATGGCCCGGCTGCTGCGTGAGTAC | |
| | CAGGAGCTCATGAACACCAAGCTGGCCCTGGACGTGGAGATCGCCACTTACCGCAAGCTGCTGGAGGGCG | |
| | AGGAATGCAGACTCAGTGGAGAAGGAGTTGGACCAGTCAACATCTCTGTTGTCACAAGCAGTGTTTCCTC | |
| | TGGATATGGCAGTGGCAGTGGCTATGGCGGTGGCCTCGGTGGAGGTCTTGGCGGCGGCCTCGGTGGAGGT | |
| | CTTGCCGGAGGTAGCAGTGGAAGCTACTACTCCAGCAGCAGTGGGGGTGTCGGCCTAGGTGGTGGGCTCA | |
| | GTGTGGGGGGCTCTGGCTTCAGTGCAAGCAGTGGCCGAGGGCTGGGGGTGGGCTTTGGCAGTGGCGGGGG | |
| | TAGCAGCTCCAGCGTCAAATTTGTCTCCACCACCTCCTCCTCCCGGAAGAGCTTCAAGAGCTAAGAACCT | |
| | GCTGCAAGTCACTGCCTTCCAAGTGCAGCAACCCAGCCCATGGAGATTGCCTCTTCTAGGCAGTTGCTCA | |
| | AGCCATGTTTTATCCTTTTCTGGAGAGTAGTCTAGACCAAGCCAATTGCAGAACCACATTCTTTGGTTCC | |
| | CAGGAGAGCCCCATTCCCAGCCCCTGGTCTCCCGTGCCGCAGTTCTATATTCTGCTTCAAATCAGCCTTC | |
| | AGGTTTCCCACAGCATGGCCCCTGCTGACACGAGAACCCAAAGTTTTCCCAAATCTAAATCATCAAAACA | |
| | GAATCCCCACCCCAATCCCAAATTTTGTTTTGGTTCTAACTACCTCCAGAATGTGTTCAATAAAATGCTT | |
| | TTATAATAT | |
| MAPT | GGACGGCCGAGCGGCAGGGCGCTCGCGCGCGCCCACTAGTGGCCGGAGGAGAAGGCTCCCGCGGAGGCCG | 243 |
| NM_001123066 | CGCTGCCCGCCCCCTCCCCTGGGGAGGCTCGCGTTCCCGCTGCTCGCGCCTGCGCCGCCCGCCGGCCTCA | |
| | GGAACGCGCCCTCTTCGCCGGCGCGCGCCCTCGCAGTCACCGCCACCCACCAGCTCCGGCACCAACAGCA | |
| | GCGCCGCTGCCACCGCCCACCTTCTGCCGCCGCCACCACAGCCACCTTCTCCTCCTCCGCTGTCCTCTCC | |
| | CGTCCTCGCCTCTGTCGACTATCAGGTGAACTTTGAACCAGGATGGCTGAGCCCCGCCAGGAGTTCGAAG | |
| | TGATGGAAGATCACGCTGGGACGTACGGGTTGGGGGACAGGAAAGATCAGGGGGGCTACACCATGCACCA | |
| | AGACCAAGAGGGTGACACGGACGCTGGCCTGAAAGAATCTCCCCTGCAGACCCCCACTGAGGACGGATCT | |
| | GAGGAACCGGGCTCTGAAACCTCTGATGCTAAGAGCACTCCAACAGCGGAAGATGTGACAGCACCCTTAG | |
| | TGGATGAGGGAGCTCCCGGCAAGCAGGCTGCCGCGCAGCCCCACACGGAGATCCCAGAAGGAACCACAGC | |
| | TGAAGAAGCAGGCATTGGAGACACCCCCAGCCTGGAAGACGAAGCTGCTGGTCACGTGACCCAAGAGCCT | |
| | GAAAGTGGTAAGGTGGTCCAGGAAGGCTTCCTCCGAGAGCCAGGCCCCCCAGGTCTGAGCCACCAGCTCA | |
| | TGTCCGGCATGCCTGGGGCTCCCCTCCTGCCTGAGGGCCCCAGAGAGGCCACACGCCAACCTTCGGGGAC | |
| | AGGACCTGAGGACACAGAGGGCGGCCGCCACGCCCCTGAGCTGCTCAAGCACCAGCTTCTAGGAGACCTG | |
| | CACCAGGAGGGGCCGCCGCTGAAGGGGGCAGGGGGCAAAGAGAGGCCGGGGAGCAAGGAGGAGGTGGATG | |
| | AAGACCGCGACGTCGATGAGTCCTCCCCCCAAGACTCCCCTCCCTCCAAGGCCTCCCCAGCCCAAGATGG | |
| | GCGGCCTCCCCAGACAGCCGCCAGAGAAGCCACCAGCATCCCAGGCTTCCCAGCGGAGGGTGCCATCCCC | |
| | CTCCCTGTGGATTTCCTCTCCAAAGTTTCCACAGAGATCCCAGCCTCAGAGCCCGACGGGCCCAGTGTAG | |
| | GGCGGGCCAAAGGGCAGGATGCCCCCCTGGAGTTCACGTTTCACGTGGAAATCACACCCAACGTGCAGAA | |
| | GGAGCAGGCGCACTCGGAGGAGCATTTGGGAAGGGCTGCATTTCCAGGGGCCCCTGGAGAGGGGCCAGAG | |
| | GCCCGGGGCCCCTCTTTGGGAGAGGACACAAAAGAGGCTGACCTTCCAGAGCCCTCTGAAAAGCAGCCTG | |
| | CTGCTGCTCCGCGGGGGAAGCCCGTCAGCCGGGTCCCTCAACTCAAAGCTCGCATGGTCAGTAAAAGCAA | |
| | AGACGGGACTGGAAGCGATGACAAAAAAGCCAAGACATCCACACGTTCCTCTGCTAAAACCTTGAAAAAT | |
| | AGGCCTTGCCTTAGCCCCAAACACCCCACTCCTGGTAGCTCAGACCCTCTGATCCAACCCTCCAGCCCTG | |
| | CTGTGTGCCCAGAGCCACCTTCCTCTCCTAAATACGTCTCTTCTGTCACTTCCCGAACTGGCAGTTCTGG | |
| | AGCAAAGGAGATGAAACTCAAGGGGGCTGATGGTAAAACGAAGATCGCCACACCGCGGGGAGCAGCCCCT | |
| | CCAGGCCAGAAGGGCCAGGCCAACGCCACCAGGATTCCAGCAAAAACCCCGCCCGCTCCAAAGACACCAC | |
| | CCAGCTCTGCGACTAAGCAAGTCCAGAGAAGACCACCCCCTGCAGGGCCCAGATCTGAGAGAGGTGAACC | |
| | TCCAAAATCAGGGGATCGCAGCGGCTACAGCAGCCCCGGCTCCCCAGGCACTCCCGGCAGCCGCTCCCGC | |
| | ACCCCGTCCCTTCCAACCCCACCCACCCGGGAGCCCAAGAAGGTGGCAGTGGTCCGTACTCCACCCAAGT | |
| | CGCCGTCTTCCGCCAAGAGCCGCCTGCAGACAGCCCCCGTGCCCATGCCAGACCTGAAGAATGTCAAGTC | |
| | CAAGATCGGCTCCACTGAGAACCTGAAGCACCAGCCGGGAGGCGGGAAGGTGCAGATAATTAATAAGAAG | |
| | CTGGATCTTAGCAACGTCCAGTCCAAGTGTGGCTCAAAGGATAATATCAAACACGTCCCGGGAGGCGGCA | |
| | GTGTGCAAATAGTCTACAAACCAGTTGACCTGAGCAAGGTGACCTCCAAGTGTGGCTCATTAGGCAACAT | |
| | CCATCATAAACCAGGAGGTGGCCAGGTGGAAGTAAAATCTGAGAAGCTTGACTTCAAGGACAGAGTCCAG | |
| | TCGAAGATTGGGTCCCTGGACAATATCACCCACGTCCCTGGCGGAGGAAATAAAAAGATTGAAACCCACA | |
| | AGCTGACCTTCCGCGAGAACGCCAAAGCCAAGACAGACCACGGGGCGGAGATCGTGTACAAGTCGCCAGT | |
| | GGTGTCTGGGGACACGTCTCCACGGCATCTCAGCAATGTCTCCTCCACCGGCAGCATCGACATGGTAGAC | |
| | TCGCCCCAGCTCGCCACGCTAGCTGACGAGGTGTCTGCCTCCCTGGCCAAGCAGGGTTTGTGATCAGGCC | |
| | CCTGGGGCGGTCAATAATTGTGGAGAGGAGAGAATGAGAGAGTGTGGAAAAAAAAAGAATAATGACCCGG | |
| | CCCCCGCCCTCTGCCCCCAGCTGCTCCTCGCAGTTCGGTTAATTGGTTAATCACTTAACCTGCTTTTGTC | |
| | ACTCGGCTTTGGCTCGGGACTTCAAAATCAGTGATGGGAGTAAGAGCAAATTTCATCTTTCCAAATTGAT | |
| | GGGTGGGCTAGTAATAAAATATTTAAAAAAAAACATTCAAAAACATGGCCACATCCAACATTTCCTCAGG | |
| | CAATTCCTTTTGATTCTTTTTTCTTCCCCCTCCATGTAGAAGAGGGAGAAGGAGAGGCTCTGAAAGCTGC | |
| | TTCTGGGGGATTTCAAGGGACTGGGGGTGCCAACCACCTCTGGCCCTGTTGTGGGGGTGTCACAGAGGCA | |
| | GTGGCAGCAACAAAGGATTTGAAACTTGGTGTGTTCGTGGAGCCACAGGCAGACGATGTCAACCTTGTGT | |
| | GAGTGTGACGGGGGTTGGGGTGGGGCGGGAGGCCACGGGGGAGGCCGAGGCAGGGGCTGGGCAGAGGGGA | |
| | GAGGAAGCACAAGAAGTGGGAGTGGGAGAGGAAGCCACGTGCTGGAGAGTAGACATCCCCCTCCTTGCCG | |
| | CTGGGAGAGCCAAGGCCTATGCCACCTGCAGCGTCTGAGCGGCCGCCTGTCCTTGGTGGCCGGGGGTGGG | |
| | GGCCTGCTGTGGGTCAGTGTGCCACCCTCTGCAGGGCAGCCTGTGGGAGAAGGGACAGCGGGTAAAAAGA | |
| | GAAGGCAAGCTGGCAGGAGGGTGGCACTTCGTGGATGACCTCCTTAGAAAAGACTGACCTTGATGTCTTG | |
| | AGAGCGCTGGCCTCTTCCTCCCTCCCTGCAGGGTAGGGGGCCTGAGTTGAGGGGCTTCCCTCTGCTCCAC | |
| | AGAAACCCTGTTTTATTGAGTTCTGAAGGTTGGAACTGCTGCCATGATTTTGGCCACTTTGCAGACCTGG | |
| | GACTTTAGGGCTAACCAGTTCTCTTTGTAAGGACTTGTGCCTCTTGGGAGACGTCCACCCGTTTCCAAGC | |
| | CTGGGCCACTGGCATCTCTGGAGTGTGTGGGGGTCTGGGAGGCAGGTCCCGAGCCCCCTGTCCTTCCCAC | |
| | GGCCACTGCAGTCACCCCGTCTGCGCCGCTGTGCTGTTGTCTGCCGTGAGAGCCCAATCACTGCCTATAC | |
| | CCCTCATCACACGTCACAATGTCCCGAATTCCCAGCCTCACCACCCCTTCTCAGTAATGACCCTGGTTGG | |
| | TTGCAGGAGGTACCTACTCCATACTGAGGGTGAAATTAAGGGAAGGCAAAGTCCAGGCACAAGAGTGGGA | |
| | CCCCAGCCTCTCACTCTCAGTTCCACTCATCCAACTGGGACCCTCACCACGAATCTCATGATCTGATTCG | |
| | GTTCCCTGTCTCCTCCTCCCGTCACAGATGTGAGCCAGGGCACTGCTCAGCTGTGACCCTAGGTGTTTCT | |
| | GCCTTGTTGACATGGAGAGAGCCCTTTCCCCTGAGAAGGCCTGGCCCCTTCCTGTGCTGAGCCCACAGCA | |
| | GCAGGCTGGGTGTCTTGGTTGTCAGTGGTGGCACCAGGATGGAAGGGCAAGGCACCCAGGGCAGGCCCAC | |
| | AGTCCCGCTGTCCCCCACTTGCACCCTAGCTTGTAGCTGCCAACCTCCCAGACAGCCCAGCCCGCTGCTC | |
| | AGCTCCACATGCATAGTATCAGCCCTCCACACCCGACAAAGGGGAACACACCCCCTTGGAAATGGTTCTT | |
| | TTCCCCCAGTCCCAGCTGGAAGCCATGCTGTCTGTTCTGCTGGAGCAGCTGAACATATACATAGATGTTG | |
| | CCCTGCCCTCCCCATCTGCACCCTGTTGAGTTGTAGTTGGATTTGTCTGTTTATGCTTGGATTCACCAGA | |
| | GTGACTATGATAGTGAAAAGAAAAAAAAAAAAAAAAAAGGACGCATGTATCTTGAAATGCTTGTAAAGAG | |
| | GTTTCTAACCCACCCTCACGAGGTGTCTCTCACCCCCACACTGGGACTCGTGTGGCCTGTGTGGTGCCAC | |
| | CCTGCTGGGGCCTCCCAAGTTTTGAAAGGCTTTCCTCAGCACCTGGGACCCAACAGAGACCAGCTTCTAG | |
| | CAGCTAAGGAGGCCGTTCAGCTGTGACGAAGGCCTGAAGCACAGGATTAGGACTGAAGCGATGATGTCCC | |
| | CTTCCCTACTTCCCCTTGGGGCTCCCTGTGTCAGGGCACAGACTAGGTCTTGTGGCTGGTCTGGCTTGCG | |
| | GCGCGAGGATGGTTCTCTCTGGTCATAGCCCGAAGTCTCATGGCAGTCCCAAAGGAGGCTTACAACTCCT | |
| | GCATCACAAGAAAAAGGAAGCCACTGCCAGCTGGGGGGATCTGCAGCTCCCAGAAGCTCCGTGAGCCTCA | |
| | GCCACCCCTCAGACTGGGTTCCTCTCCAAGCTCGCCCTCTGGAGGGGCAGCGCAGCCTCCCACCAAGGGC | |
| | CCTGCGACCACAGCAGGGATTGGGATGAATTGCCTGTCCTGGATCTGCTCTAGAGGCCCAAGCTGCCTGC | |
| | CTGAGGAAGGATGACTTGACAAGTCAGGAGACACTGTTCCCAAAGCCTTGACCAGAGCACCTCAGCCCGC | |
| | TGACCTTGCACAAACTCCATCTGCTGCCATGAGAAAAGGGAAGCCGCCTTTGCAAAACATTGCTGCCTAA | |
| | AGAAACTCAGCAGCCTCAGGCCCAATTCTGCCACTTCTGGTTTGGGTACAGTTAAAGGCAACCCTGAGGG | |
| | ACTTGGCAGTAGAAATCCAGGGCCTCCCCTGGGGCTGGCAGCTTCGTGTGCAGCTAGAGCTTTACCTGAA | |
| | AGGAAGTCTCTGGGCCCAGAACTCTCCACCAAGAGCCTCCCTGCCGTTCGCTGAGTCCCAGCAATTCTCC | |
| | TAAGTTGAAGGGATCTGAGAAGGAGAAGGAAATGTGGGGTAGATTTGGTGGTGGTTAGAGATATGCCCCC | |
| | CTCATTACTGCCAACAGTTTCGGCTGCATTTCTTCACGCACCTCGGTTCCTCTTCCTGAAGTTCTTGTGC | |
| | CCTGCTCTTCAGCACCATGGGCCTTCTTATACGGAAGGCTCTGGGATCTCCCCCTTGTGGGGCAGGCTCT | |
| | TGGGGCCAGCCTAAGATCATGGTTTAGGGTGATCAGTGCTGGCAGATAAATTGAAAAGGCACGCTGGCTT | |
| | GTGATCTTAAATGAGGACAATCCCCCCAGGGCTGGGCACTCCTCCCCTCCCCTCACTTCTCCCACCTGCA | |
| | GAGCCAGTGTCCTTGGGTGGGCTAGATAGGATATACTGTATGCCGGCTCCTTCAAGCTGCTGACTCACTT | |
| | TATCAATAGTTCCATTTAAATTGACTTCAGTGGTGAGACTGTATCCTGTTTGCTATTGCTTGTTGTGCTA | |
| | TGGGGGGAGGGGGGAGGAATGTGTAAGATAGTTAACATGGGCAAAGGGAGATCTTGGGGTGCAGCACTTA | |
| | AACTGCCTCGTAACCCTTTTCATGATTTCAACCACATTTGCTAGAGGGAGGGAGCAGCCACGGAGTTAGA | |
| | GGCCCTTGGGGTTTCTCTTTTCCACTGACAGGCTTTCCCAGGCAGCTGGCTAGTTCATTCCCTCCCCAGC | |
| | CAGGTGCAGGCGTAGGAATATGGACATCTGGTTGCTTTGGCCTGCTGCCCTCTTTCAGGGGTCCTAAGCC | |
| | CACAATCATGCCTCCCTAAGACCTTGGCATCCTTCCCTCTAAGCCGTTGGCACCTCTGTGCCACCTCTCA | |
| | CACTGGCTCCAGACACACAGCCTGTGCTTTTGGAGCTGAGATCACTCGCTTCACCCTCCTCATCTTTGTT | |
| | CTCCAAGTAAAGCCACGAGGTCGGGGCGAGGGCAGAGGTGATCACCTGCGTGTCCCATCTACAGACCTGC | |
| | AGCTTCATAAAACTTCTGATTTCTCTTCAGCTTTGAAAAGGGTTACCCTGGGCACTGGCCTAGAGCCTCA | |
| | CCTCCTAATAGACTTAGCCCCATGAGTTTGCCATGTTGAGCAGGACTATTTCTGGCACTTGCAAGTCCCA | |
| | TGATTTCTTCGGTAATTCTGAGGGTGGGGGGAGGGACATGAAATCATCTTAGCTTAGCTTTCTGTCTGTG | |
| | AATGTCTATATAGTGTATTGTGTGTTTTAACAAATGATTTACACTGACTGTTGCTGTAAAAGTGAATTTG | |
| | GAAATAAAGTTATTACTCTGATTAAA | |
| MDM2 | GCACCGCGCGAGCTTGGCTGCTTCTGGGGCCTGTGTGGCCCTGTGTGTCGGAAAGATGGAGCAAGAAGCC | 244 |
| M92424 | GAGCCCGAGGGGCGGCCGCGACCCCTCTGACCGAGATCCTGCTGCTTTCGCAGCCAGGAGCACCGTCCCT | |
| | CCCCGGATTAGTGCGTACGAGCGCCCAGTGCCCTGGCCCGGAGAGTGGAATGATCCCCGAGGCCCAGGGC | |
| | GTCGTGCTTCCGCAGTAGTCAGTCCCCGTGAAGGAAACTGGGGAGTCTTGAGGGACCCCCGACTCCAAGC | |
| | GCGAAAACCCCGGATGGTGAGGAGCAGGCAAATGTGCAATACCAACATGTCTGTACCTACTGATGGTGCT | |
| | GTAACCACCTCACAGATTCCAGCTTCGGAACAAGAGACCCTGGTTAGACCAAAGCCATTGCTTTTGAAGT | |
| | TATTAAAGTCTGTTGGTGCACAAAAAGACACTTATACTATGAAAGAGGTTCTTTTTTATCTTGGCCAGTA | |
| | TATTATGACTAAACGATTATATGATGAGAAGCAACAACATATTGTATATTGTTCAAATGATCTTCTAGGA | |
| | GATTTGTTTGGCGTGCCAAGCTTCTCTGTGAAAGAGCACAGGAAAATATATACCATGATCTACAGGAACT | |
| | TGGTAGTAGTCAATCAGCAGGAATCATCGGACTCAGGTACATCTGTGAGTGAGAACAGGTGTCACCTTGA | |
| | AGGTGGGAGTGATCAAAAGGACCTTGTACAAGAGCTTCAGGAAGAGAAACCTTCATCTTCACATTTGGTT | |
| | TCTAGACCATCTACCTCATCTAGAAGGAGAGCAATTAGTGAGACAGAAGAAAATTCAGATGAATTATCTG | |
| | GTGAACGACAAAGAAAACGCCACAAATCTGATAGTATTTCCCTTTCCTTTGATGAAAGCCTGGCTCTGTG | |
| | TGTAATAAGGGAGATATGTTGTGAAAGAAGCAGTAGCAGTGAATCTACAGGGACGCCATCGAATCCGGAT | |
| | CTTGATGCTGGTGTAAGTGAACATTCAGGTGATTGGTTGGATCAGGATTCAGTTTCAGATCAGTTTAGTG | |
| | TAGAATTTGAAGTTGAATCTCTCGACTCAGAAGATTATAGCCTTAGTGAAGAAGGACAAGAACTCTCAGA | |
| | TGAAGATGATGAGGTATATCAAGTTACTGTGTATCAGGCAGGGGAGAGTGATACAGATTCATTTGAAGAA | |
| | GATCCTGAAATTTCCTTAGCTGACTATTGGAAATGCACTTCATGCAATGAAATGAATCCCCCCCTTCCAT | |
| | CACATTGCAACAGATGTTGGGCCCTTCGTGAGAATTGGCTTCCTGAAGATAAAGGGAAAGATAAAGGGGA | |
| | AATCTCTGAGAAAGCCAAACTGGAAAACTCAACACAAGCTGAAGAGGGCTTTGATGTTCCTGATTGTAAA | |
| | AAAACTATAGTGAATGATTCCAGAGAGTCATGTGTTGAGGAAAATGATGATAAAATTACACAAGCTTCAC | |
| | AATCACAAGAAAGTGAAGACTATTCTCAGCCATCAACTTCTAGTAGCATTATTTATAGCAGCCAAGAAGA | |
| | TGTGAAAGAGTTTGAAAGGGAAGAAACCCAAGACAAAGAAGAGAGTGTGGAATCTAGTTTGCCCCTTAAT | |
| | GCCATTGAACCTTGTGTGATTTGTCAAGGTCGACCTAAAAATGGTTGCATTGTCCATGGCAAAACAGGAC | |
| | ATCTTATGGCCTGCTTTACATGTGCAAAGAAGCTAAAGAAAAGGAATAAGCCCTGCCCAGTATGTAGACA | |
| | ACCAATTCAAATGATTGTGCTAACTTATTTCCCCTAGTTGACCTGTCTATAAGAGAATTATATATTTCTA | |
| | ACTATATAACCCTAGGAATTTAGACAACCTGAAATTTATTCACATATATCAAAGTGAGAAAATGCCTCAA | |
| | TTCACATAGATTTCTTCTCTTTAGTATAATTGACCTACTTTGGTAGTGGAATAGTGAATACTTACTATAA | |
| | TTTGACTTGAATATGTAGCTCATCCTTTACACCAACTCCTAATTTTAAATAATTTCTACTCTGTCTTAAA | |
| | TGAGAAGTACTTGGTTTTTTTTTTCTTAAATATGTATATGACATTTAAATGTAACTTATTATTTTTTTTG | |
| | AGACCGAGTCTTGCTCTGTTACCCAGGCTGGAGTGCAGTGGGTGATCTTGGCTCACTGCAAGCTCTGCCC | |
| | TCCCCGGGTTCGCACCATTCTCCTGCCTCAGCCTCCCAATTAGCTTGGCCTACAGTCATCTGCCACCACA | |
| | CCTGGCTAATTTTTTGTACTTTTAGTAGAGACAGGGTTTCACCGTGTTAGCCAGGATGGTCTCGATCTCC | |
| | TGACCTCGTGATCCGCCCACCTCGGCCTCCCAAAGTGCTGGGATTACAGGCATGAGCCACCG | |
| MELK | GAGATTTGATTCCCTTGGCGGGCGGAAGCGGCCACAACCCGGCGATCGAAAAGATTCTTAGGAACGCCGT | 245 |
| NM_014791 | ACCAGCCGCGTCTCTCAGGACAGCAGGCCCCTGTCCTTCTGTCGGGCGCCGCTCAGCCGTGCCCTCCGCC | |
| | CCTCAGGTTCTTTTTCTAATTCCAAATAAACTTGCAAGAGGACTATGAAAGATTATGATGAACTTCTCAA | |
| | ATATTATGAATTACATGAAACTATTGGGACAGGTGGCTTTGCAAAGGTCAAACTTGCCTGCCATATCCTT | |
| | ACTGGAGAGATGGTAGCTATAAAAATCATGGATAAAAACACACTAGGGAGTGATTTGCCCCGGATCAAAA | |
| | CGGAGATTGAGGCCTTGAAGAACCTGAGACATCAGCATATATGTCAACTCTACCATGTGCTAGAGACAGC | |
| | CAACAAAATATTCATGGTTCTTGAGTACTGCCCTGGAGGAGAGCTGTTTGACTATATAATTTCCCAGGAT | |
| | CGCCTGTCAGAAGAGGAGACCCGGGTTGTCTTCCGTCAGATAGTATCTGCTGTTGCTTATGTGCACAGCC | |
| | AGGGCTATGCTCACAGGGACCTCAAGCCAGAAAATTTGCTGTTTGATGAATATCATAAATTAAAGCTGAT | |
| | TGACTTTGGTCTCTGTGCAAAACCCAAGGGTAACAAGGATTACCATCTACAGACATGCTGTGGGAGTCTG | |
| | GCTTATGCAGCACCTGAGTTAATACAAGGCAAATCATATCTTGGATCAGAGGCAGATGTTTGGAGCATGG | |
| | GCATACTGTTATATGTTCTTATGTGTGGATTTCTACCATTTGATGATGATAATGTAATGGCTTTATACAA | |
| | GAAGATTATGAGAGGAAAATATGATGTTCCCAAGTGGCTCTCTCCCAGTAGCATTCTGCTTCTTCAACAA | |
| | ATGCTGCAGGTGGACCCAAAGAAACGGATTTCTATGAAAAATCTATTGAACCATCCCTGGATCATGCAAG | |
| | ATTACAACTATCCTGTTGAGTGGCAAAGCAAGAATCCTTTTATTCACCTCGATGATGATTGCGTAACAGA | |
| | ACTTTCTGTACATCACAGAAACAACAGGCAAACAATGGAGGATTTAATTTCACTGTGGCAGTATGATCAC | |
| | CTCACGGCTACCTATCTTCTGCTTCTAGCCAAGAAGGCTCGGGGAAAACCAGTTCGTTTAAGGCTTTCTT | |
| | CTTTCTCCTGTGGACAAGCCAGTGCTACCCCATTCACAGACATCAAGTCAAATAATTGGAGTCTGGAAGA | |
| | TGTGACCGCAAGTGATAAAAATTATGTGGCGGGATTAATAGACTATGATTGGTGTGAAGATGATTTATCA | |
| | ACAGGTGCTGCTACTCCCCGAACATCACAGTTTACCAAGTACTGGACAGAATCAAATGGGGTGGAATCTA | |
| | AATCATTAACTCCAGCCTTATGCAGAACACCTGCAAATAAATTAAAGAACAAAGAAAATGTATATACTCC | |
| | TAAGTCTGCTGTAAAGAATGAAGAGTACTTTATGTTTCCTGAGCCAAAGACTCCAGTTAATAAGAACCAG | |
| | CATAAGAGAGAAATACTCACTACGCCAAATCGTTACACTACACCCTCAAAAGCTAGAAACCAGTGCCTGA | |
| | AAGAAACTCCAATTAAAATACCAGTAAATTCAACAGGAACAGACAAGTTAATGACAGGTGTCATTAGCCC | |
| | TGAGAGGCGGTGCCGCTCAGTGGAATTGGATCTCAACCAAGCACATATGGAGGAGACTCCAAAAAGAAAG | |
| | GGAGCCAAAGTGTTTGGGAGCCTTGAAAGGGGGTTGGATAAGGTTATCACTGTGCTCACCAGGAGCAAAA | |
| | GGAAGGGTTCTGCCAGAGACGGGCCCAGAAGACTAAAGCTTCACTATAACGTGACTACAACTAGATTAGT | |
| | GAATCCAGATCAACTGTTGAATGAAATAATGTCTATTCTTCCAAAGAAGCATGTTGACTTTGTACAAAAG | |
| | GGTTATACACTGAAGTGTCAAACACAGTCAGATTTTGGGAAAGTGACAATGCAATTTGAATTAGAAGTGT | |
| | GCCAGCTTCAAAAACCCGATGTGGTGGGTATCAGGAGGCAGCGGCTTAAGGGCGATGCCTGGGTTTACAA | |
| | AAGATTAGTGGAAGACATCCTATCTAGCTGCAAGGTATAATTGATGGATTCTTCCATCCTGCCGGATGAG | |
| | TGTGGGTGTGATACAGCCTACATAAAGACTGTTATGATCGCTTTGATTTTAAAGTTCATTGGAACTACCA | |
| | ACTTGTTTCTAAAGAGCTATCTTAAGACCAATATCTCTTTGTTTTTAAACAAAAGATATTATTTTGTGTA | |
| | TGAATCTAAATCAAGCCCATCTGTCATTATGTTACTGTCTTTTTTAATCATGTGGTTTTGTATATTAATA | |
| | ATTGTTGACTTTCTTAGATTCACTTCCATATGTGAATGTAAGCTCTTAACTATGTCTCTTTGTAATGTGT | |
| | AATTTCTTTCTGAAATAAAACCATTTGTGAATATAG | |
| MIA | GCAGCGGAGGAGCCCAGTCCACGATGGCCCGGTCCCTGGTGTGCCTTGGTGTCATCATCTTGCTGTCTGC | 246 |
| BG765502 | CTTCTCCGGACCTGGTGTCAGGGGTGGTCCTATGCCCAAGCTGGCTGACCGGAAGCTGTGTGCGGACCAG | |
| | GAGTGCAGCCACCCTATCTCCATGGCTGTGGCCCTTCAGGACTACATGGCCCCCGACTGCCGATTCCTGA | |
| | CCATTCACCGGGGCCAAGTGGTGTATGTCTTCTCCAAGCTGAAGGGCCGTGGGCGGCTCTTCTGGGGAGG | |
| | CAGCGTTCAGGGAGATTACTATGGAGATCTGGCTGCTCGCCTGGGCTATTTCCCCAGTAGCATTGTCCGA | |
| | GAGGACCAGACCCTGAAACCTGGCAAAGTCGATGTGAAGACAGACAAATGGGATTTCTACTGCCAGTGAG | |
| | CTCAGCCTACCGCTGGCCCTGCCGTTTCCCCTCCTTGGGTTTATGCAAATACAATCAGCCCAGTGCAAAA | |
| | AAAAAAAAAAAAAAAAAAAACTTCGGAGAAGAGATAGCAACAAAAGGCCGCTTGTGTGAAGGCGCCAAAA | |
| | GTTTTCGCCCAAGAGACCTTCGGCCTCCCCCAGGGCGCGCGCAAAGGCGCCTTGTTTTGACAACCTCTTG | |
| | GACAACCGGAGGGGCTACCGCCCGGAGACCCCTGTGGTGGACCCCCCGGGCAACCCGGTGTGACAGGGTA | |
| | CTCACCCCCACGGCTTTGTCGGGGGTCCCACCAAAGGCCCCAAAGAGGCTCTTTCAAGGCACTATTCCTT | |
| | GTTGTAGACCTTGTGTGTGCCACAGGCGCCAAAGAAACCTCGGGGGGCTAACAAACGCACGTGCTTGGCA | |
| | GCTCCGAGAAGGCTCTCTCCCACCCGAGGGGTGGACGCAACAGGGGGAATGGGCCATCATATTGTTGCCC | |
| | CCGGTGGGCACCAACTCTTTTTCCCCCATAGAGAGGCCTTAGCACACTATGTGGGGCACGTTATTGCCGC | |
| | CTAGAGAAACCGAGCGCCAGAAAATTTCGAAGGGGGGGGCGCTTCTCATCATTTTGCGCAAAACCCCCTT | |
| | GTGGGAGTATGCCCCGAACTCCTCTGGAACACACAAGCGACACTTGCGCGGGGTCTGCAAAAAACCTCCT | |
| | GTTGGGAAGCCGGCTTCACN | |
| MKI67 | TACCGGGCGGAGGTGAGCGCGGCGCCGGCTCCTCCTGCGGCGGACTTTGGGTGCGACTTGACGAGCGGTG | 247 |
| NM_002417 | GTTCGACAAGTGGCCTTGCGGGCCGGATCGTCCCAGTGGAAGAGTTGTAAATTTGCTTCTGGCCTTCCCC | |
| | TACGGATTATACCTGGCCTTCCCCTACGGATTATACTCAACTTACTGTTTAGAAAATGTGGCCCACGAGA | |
| | CGCCTGGTTACTATCAAAAGGAGCGGGGTCGACGGTCCCCACTTTCCCCTGAGCCTCAGCACCTGCTTGT | |
| | TTGGAAGGGGTATTGAATGTGACATCCGTATCCAGCTTCCTGTTGTGTCAAAACAACATTGCAAAATTGA | |
| | AATCCATGAGCAGGAGGCAATATTACATAATTTCAGTTCCACAAATCCAACACAAGTAAATGGGTCTGTT | |
| | ATTGATGAGCCTGTACGGCTAAAACATGGAGATGTAATAACTATTATTGATCGTTCCTTCAGGTATGAAA | |
| | ATGAAAGTCTTCAGAATGGAAGGAAGTCAACTGAATTTCCAAGAAAAATACGTGAACAGGAGCCAGCACG | |
| | TCGTGTCTCAAGATCTAGCTTCTCTTCTGACCCTGATGAGAAAGCTCAAGATTCCAAGGCCTATTCAAAA | |
| | ATCACTGAAGGAAAAGTTTCAGGAAATCCTCAGGTACATATCAAGAATGTCAAAGAAGACAGTACCGCAG | |
| | ATGACTCAAAAGACAGTGTTGCTCAGGGAACAACTAATGTTCATTCCTCAGAACATGCTGGACGTAATGG | |
| | CAGAAATGCAGCTGATCCCATTTCTGGGGATTTTAAAGAAATTTCCAGCGTTAAATTAGTGAGCCGTTAT | |
| | GGAGAATTGAAGTCTGTTCCCACTACACAATGTCTTGACAATAGCAAAAAAAATGAATCTCCCTTTTGGA | |
| | AGCTTTATGAGTCAGTGAAGAAAGAGTTGGATGTAAAATCACAAAAAGAAAATGTCCTACAGTATTGTAG | |
| | AAAATCTGGATTACAAACTGATTACGCAACAGAGAAAGAAAGTGCTGATGGTTTACAGGGGGAGACCCAA | |
| | CTGTTGGTCTCGCGTAAGTCAAGACCAAAATCTGGTGGGAGCGGCCACGCTGTGGCAGAGCCTGCTTCAC | |
| | CTGAACAAGAGCTTGACCAGAACAAGGGGAAGGGAAGAGACGTGGAGTCTGTTCAGACTCCCAGCAAGGC | |
| | TGTGGGCGCCAGCTTTCCTCTCTATGAGCCGGCTAAAATGAAGACCCCTGTACAATATTCACAGCAACAA | |
| | AATTCTCCACAAAAACATAAGAACAAAGACCTGTATACTACTGGTAGAAGAGAATCTGTGAATCTGGGTA | |
| | AAAGTGAAGGCTTCAAGGCTGGTGATAAAACTCTTACTCCCAGGAAGCTTTCAACTAGAAATCGAACACC | |
| | AGCTAAAGTTGAAGATGCAGCTGACTCTGCCACTAAGCCAGAAAATCTCTCTTCCAAAACCAGAGGAAGT | |
| | ATTCCTACAGATGTGGAAGTTCTGCCTACGGAAACTGAAATTCACAATGAGCCATTTTTAACTCTGTGGC | |
| | TCACTCAAGTTGAGAGGAAGATCCAAAAGGATTCCCTCAGCAAGCCTGAGAAATTGGGCACTACAGCTGG | |
| | ACAGATGTGCTCTGGGTTACCTGGTCTTAGTTCAGTTGATATCAACAACTTTGGTGATTCCATTAATGAG | |
| | AGTGAGGGAATACCTTTGAAAAGAAGGCGTGTGTCCTTTGGTGGGCACCTAAGACCTGAACTATTTGATG | |
| | AAAACTTGCCTCCTAATACGCCTCTCAAAAGGGGAGAAGCCCCAACCAAAAGAAAGTCTCTGGTAATGCA | |
| | CACTCCACCTGTCCTGAAGAAAATCATCAAGGAACAGCCTCAACCATCAGGAAAACAAGAGTCAGGTTCA | |
| | GAAATCCATGTGGAAGTGAAGGCACAAAGCTTGGTTATAAGCCCTCCAGCTCCTAGTCCTAGGAAAACTC | |
| | CAGTTGCCAGTGATCAACGCCGTAGGTCCTGCAAAACAGCCCCTGCTTCCAGCAGCAAATCTCAGACAGA | |
| | GGTTCCTAAGAGAGGAGGGAGAAAGAGTGGCAACCTGCCTTCAAAGAGAGTGTCTATCAGCCGAAGTCAA | |
| | CATGATATTTTACAGATGATATGTTCCAAAAGAAGAAGTGGTGCTTCGGAAGCAAATCTGATTGTTGCAA | |
| | AATCATGGGCAGATGTAGTAAAACTTGGTGCAAAACAAACACAAACTAAAGTCATAAAACATGGTCCTCA | |
| | AAGGTCAATGAACAAAAGGCAAAGAAGACCTGCTACTCCAAAGAAGCCTGTGGGCGAAGTTCACAGTCAA | |
| | TTTAGTACAGGCCACGCAAACTCTCCTTGTACCATAATAATAGGGAAAGCTCATACTGAAAAAGTACATG | |
| | TGCCTGCTCGACCCTACAGAGTGCTCAACAACTTCATTTCCAACCAAAAAATGGACTTTAAGGAAGATCT | |
| | TTCAGGAATAGCTGAAATGTTCAAGACCCCAGTGAAGGAGCAACCGCAGTTGACAAGCACATGTCACATC | |
| | GCTATTTCAAATTCAGAGAATTTGCTTGGAAAACAGTTTCAAGGAACTGATTCAGGAGAAGAACCTCTGC | |
| | TCCCCACCTCAGAGAGTTTTGGAGGAAATGTGTTCTTCAGTGCACAGAATGCAGCAAAACAGCCATCTGA | |
| | TAAATGCTCTGCAAGCCCTCCCTTAAGACGGCAGTGTATTAGAGAAAATGGAAACGTAGCAAAAACGCCC | |
| | AGGAACACCTACAAAATGACTTCTCTGGAGACAAAAACTTCAGATACTGAGACAGAGCCTTCAAAAACAG | |
| | TATCCACTGCAAACAGGTCAGGAAGGTCTACAGAGTTCAGGAATATACAGAAGCTACCTGTGGAAAGTAA | |
| | GAGTGAAGAAACAAATACAGAAATTGTTGAGTGCATCCTAAAAAGAGGTCAGAAGGCAACACTACTACAA | |
| | CAAAGGAGAGAAGGAGAGATGAAGGAAATAGAAAGACCTTTTGAGACATATAAGGAAAATATTGAATTAA | |
| | AAGAAAACGATGAAAAGATGAAAGCAATGAAGAGATCAAGAACTTGGGGGCAGAAATGTGCACCAATGTC | |
| | TGACCTGACAGACCTCAAGAGCTTGCCTGATACAGAACTCATGAAAGACACGGCACGTGGCCAGAATCTC | |
| | CTCCAAACCCAAGATCATGCCAAGGCACCAAAGAGTGAGAAAGGCAAAATCACTAAAATGCCCTGCCAGT | |
| | CATTACAACCAGAACCAATAAACACCCCAACACACACAAAACAACAGTTGAAGGCATCCCTGGGGAAAGT | |
| | AGGTGTGAAAGAAGAGCTCCTAGCAGTCGGCAAGTTCACACGGACGTCAGGGGAGACCACGCACACGCAC | |
| | AGAGAGCCAGCAGGAGATGGCAAGAGCATCAGAACGTTTAAGGAGTCTCCAAAGCAGATCCTGGACCCAG | |
| | CAGCCCGTGTAACTGGAATGAAGAAGTGGCCAAGAACGCCTAAGGAAGAGGCCCAGTCACTAGAAGACCT | |
| | GGCTGGCTTCAAAGAGCTCTTCCAGACACCAGGTCCCTCTGAGGAATCAATGACTGATGAGAAAACTACC | |
| | AAAATAGCCTGCAAATCTCCACCACCAGAATCAGTGGACACTCCAACAAGCACAAAGCAATGGCCTAAGA | |
| | GAAGTCTCAGGAAAGCAGATGTAGAGGAAGAATTCTTAGCACTCAGGAAACTAACACCATCAGCAGGGAA | |
| | AGCCATGCTTACGCCCAAACCAGCAGGAGGTGATGAGAAAGACATTAAAGCATTTATGGGAACTCCAGTG | |
| | CAGAAACTGGACCTGGCAGGAACTTTACCTGGCAGCAAAAGACAGCTACAGACTCCTAAGGAAAAGGCCC | |
| | AGGCTCTAGAAGACCTGGCTGGCTTTAAAGAGCTCTTCCAGACTCCTGGTCACACCGAGGAATTAGTGGC | |
| | TGCTGGTAAAACCACTAAAATACCCTGCGACTCTCCACAGTCAGACCCAGTGGACACCCCAACAAGCACA | |
| | AAGCAACGACCCAAGAGAAGTATCAGGAAAGCAGATGTAGAGGGAGAACTCTTAGCGTGCAGGAATCTAA | |
| | TGCCATCAGCAGGCAAAGCCATGCACACGCCTAAACCATCAGTAGGTGAAGAGAAAGACATCATCATATT | |
| | TGTGGGAACTCCAGTGCAGAAACTGGACCTGACAGAGAACTTAACCGGCAGCAAGAGACGGCCACAAACT | |
| | CCTAAGGAAGAGGCCCAGGCTCTGGAAGACCTGACTGGCTTTAAAGAGCTCTTCCAGACCCCTGGTCATA | |
| | CTGAAGAAGCAGTGGCTGCTGGCAAAACTACTAAAATGCCCTGCGAATCTTCTCCACCAGAATCAGCAGA | |
| | CACCCCAACAAGCACAAGAAGGCAGCCCAAGACACCTTTGGAGAAAAGGGACGTACAGAAGGAGCTCTCA | |
| | GCCCTGAAGAAGCTCACACAGACATCAGGGGAAACCACACACACAGATAAAGTACCAGGAGGTGAGGATA | |
| | AAAGCATCAACGCGTTTAGGGAAACTGCAAAACAGAAACTGGACCCAGCAGCAAGTGTAACTGGTAGCAA | |
| | GAGGCACCCAAAAACTAAGGAAAAGGCCCAACCCCTAGAAGACCTGGCTGGCTTGAAAGAGCTCTTCCAG | |
| | ACACCAGTATGCACTGACAAGCCCACGACTCACGAGAAAACTACCAAAATAGCCTGCAGATCACAACCAG | |
| | ACCCAGTGGACACACCAACAAGCTCCAAGCCACAGTCCAAGAGAAGTCTCAGGAAAGTGGACGTAGAAGA | |
| | AGAATTCTTCGCACTCAGGAAACGAACACCATCAGCAGGCAAAGCCATGCACACACCCAAACCAGCAGTA | |
| | AGTGGTGAGAAAAACATCTACGCATTTATGGGAACTCCAGTGCAGAAACTGGACCTGACAGAGAACTTAA | |
| | CTGGCAGCAAGAGACGGCTACAAACTCCTAAGGAAAAGGCCCAGGCTCTAGAAGACCTGGCTGGCTTTAA | |
| | AGAGCTCTTCCAGACACGAGGTCACACTGAGGAATCAATGACTAACGATAAAACTGCCAAAGTAGCCTGC | |
| | AAATCTTCACAACCAGACCCAGACAAAAACCCAGCAAGCTCCAAGCGACGGCTCAAGACATCCCTGGGGA | |
| | AAGTGGGCGTGAAAGAAGAGCTCCTAGCAGTTGGCAAGCTCACACAGACATCAGGAGAGACTACACACAC | |
| | ACACACAGAGCCAACAGGAGATGGTAAGAGCATGAAAGCATTTATGGAGTCTCCAAAGCAGATCTTAGAC | |
| | TCAGCAGCAAGTCTAACTGGCAGCAAGAGGCAGCTGAGAACTCCTAAGGGAAAGTCTGAAGTCCCTGAAG | |
| | ACCTGGCCGGCTTCATCGAGCTCTTCCAGACACCAAGTCACACTAAGGAATCAATGACTAACGAAAAAAC | |
| | TACCAAAGTATCCTACAGAGCTTCACAGCCAGACCTAGTGGACACCCCAACAAGCTCCAAGCCACAGCCC | |
| | AAGAGAAGTCTCAGGAAAGCAGACACTGAAGAAGAATTTTTAGCATTTAGGAAACAAACGCCATCAGCAG | |
| | GCAAAGCCATGCACACACCCAAACCAGCAGTAGGTGAAGAGAAAGACATCAACACGTTTTTGGGAACTCC | |
| | AGTGCAGAAACTGGACCAGCCAGGAAATTTACCTGGCAGCAATAGACGGCTACAAACTCGTAAGGAAAAG | |
| | GCCCAGGCTCTAGAAGAACTGACTGGCTTCAGAGAGCTTTTCCAGACACCATGCACTGATAACCCCACGA | |
| | CTGATGAGAAAACTACCAAAAAAATACTCTGCAAATCTCCGCAATCAGACCCAGCGGACACCCCAACAAA | |
| | CACAAAGCAACGGCCCAAGAGAAGCCTCAAGAAAGCAGACGTAGAGGAAGAATTTTTAGCATTCAGGAAA | |
| | CTAACACCATCAGCAGGCAAAGCCATGCACACGCCTAAAGCAGCAGTAGGTGAAGAGAAAGACATCAACA | |
| | CATTTGTGGGGACTCCAGTGGAGAAACTGGACCTGCTAGGAAATTTACCTGGCAGCAAGAGACGGCCACA | |
| | AACTCCTAAAGAAAAGGCCAAGGCTCTAGAAGATCTGGCTGGCTTCAAAGAGCTCTTCCAGACACCAGGT | |
| | CACACTGAGGAATCAATGACCGATGACAAAATCACAGAAGTATCCTGCAAATCTCCACAACCAGACCCAG | |
| | TCAAAACCCCAACAAGCTCCAAGCAACGACTCAAGATATCCTTGGGGAAAGTAGGTGTGAAAGAAGAGGT | |
| | CCTACCAGTCGGCAAGCTCACACAGACGTCAGGGAAGACCACACAGACACACAGAGAGACAGCAGGAGAT | |
| | GGAAAGAGCATCAAAGCGTTTAAGGAATCTGCAAAGCAGATGCTGGACCCAGCAAACTATGGAACTGGGA | |
| | TGGAGAGGTGGCCAAGAACACCTAAGGAAGAGGCCCAATCACTAGAAGACCTGGCCGGCTTCAAAGAGCT | |
| | CTTCCAGACACCAGACCACACTGAGGAATCAACAACTGATGACAAAACTACCAAAATAGCCTGCAAATCT | |
| | CCACCACCAGAATCAATGGACACTCCAACAAGCACAAGGAGGCGGCCCAAAACACCTTTGGGGAAAAGGG | |
| | ATATAGTGGAAGAGCTCTCAGCCCTGAAGCAGCTCACACAGACCACACACACAGACAAAGTACCAGGAGA | |
| | TGAGGATAAAGGCATCAACGTGTTCAGGGAAACTGCAAAACAGAAACTGGACCCAGCAGCAAGTGTAACT | |
| | GGTAGCAAGAGGCAGCCAAGAACTCCTAAGGGAAAAGCCCAACCCCTAGAAGACTTGGCTGGCTTGAAAG | |
| | AGCTCTTCCAGACACCAATATGCACTGACAAGCCCACGACTCATGAGAAAACTACCAAAATAGCCTGCAG | |
| | ATCTCCACAACCAGACCCAGTGGGTACCCCAACAATCTTCAAGCCACAGTCCAAGAGAAGTCTCAGGAAA | |
| | GCAGACGTAGAGGAAGAATCCTTAGCACTCAGGAAACGAACACCATCAGTAGGGAAAGCTATGGACACAC | |
| | CCAAACCAGCAGGAGGTGATGAGAAAGACATGAAAGCATTTATGGGAACTCCAGTGCAGAAATTGGACCT | |
| | GCCAGGAAATTTACCTGGCAGCAAAAGATGGCCACAAACTCCTAAGGAAAAGGCCCAGGCTCTAGAAGAC | |
| | CTGGCTGGCTTCAAAGAGCTCTTCCAGACACCAGGCACTGACAAGCCCACGACTGATGAGAAAACTACCA | |
| | AAATAGCCTGCAAATCTCCACAACCAGACCCAGTGGACACCCCAGCAAGCACAAAGCAACGGCCCAAGAG | |
| | AAACCTCAGGAAAGCAGACGTAGAGGAAGAATTTTTAGCACTCAGGAAACGAACACCATCAGCAGGCAAA | |
| | GCCATGGACACACCAAAACCAGCAGTAAGTGATGAGAAAAATATCAACACATTTGTGGAAACTCCAGTGC | |
| | AGAAACTGGACCTGCTAGGAAATTTACCTGGCAGCAAGAGACAGCCACAGACTCCTAAGGAAAAGGCTGA | |
| | GGCTCTAGAGGACCTGGTTGGCTTCAAAGAACTCTTCCAGACACCAGGTCACACTGAGGAATCAATGACT | |
| | GATGACAAAATCACAGAAGTATCCTGTAAATCTCCACAGCCAGAGTCATTCAAAACCTCAAGAAGCTCCA | |
| | AGCAAAGGCTCAAGATACCCCTGGTGAAAGTGGACATGAAAGAAGAGCCCCTAGCAGTCAGCAAGCTCAC | |
| | ACGGACATCAGGGGAGACTACGCAAACACACACAGAGCCAACAGGAGATAGTAAGAGCATCAAAGCGTTT | |
| | AAGGAGTCTCCAAAGCAGATCCTGGACCCAGCAGCAAGTGTAACTGGTAGCAGGAGGCAGCTGAGAACTC | |
| | GTAAGGAAAAGGCCCGTGCTCTAGAAGACCTGGTTGACTTCAAAGAGCTCTTCTCAGCACCAGGTCACAC | |
| | TGAAGAGTCAATGACTATTGACAAAAACACAAAAATTCCCTGCAAATCTCCCCCACCAGAACTAACAGAC | |
| | ACTGCCACGAGCACAAAGAGATGCCCCAAGACACGTCCCAGGAAAGAAGTAAAAGAGGAGCTCTCAGCAG | |
| | TTGAGAGGCTCACGCAAACATCAGGGCAAAGCACACACACACACAAAGAACCAGCAAGCGGTGATGAGGG | |
| | CATCAAAGTATTGAAGCAACGTGCAAAGAAGAAACCAAACCCAGTAGAAGAGGAACCCAGCAGGAGAAGG | |
| | CCAAGAGCACCTAAGGAAAAGGCCCAACCCCTGGAAGACCTGGCCGGCTTCACAGAGCTCTCTGAAACAT | |
| | CAGGTCACACTCAGGAATCACTGACTGCTGGCAAAGCCACTAAAATACCCTGCGAATCTCCCCCACTAGA | |
| | AGTGGTAGACACCACAGCAAGCACAAAGAGGCATCTCAGGACACGTGTGCAGAAGGTACAAGTAAAAGAA | |
| | GAGCCTTCAGCAGTCAAGTTCACACAAACATCAGGGGAAACCACGGATGCAGACAAAGAACCAGCAGGTG | |
| | AAGATAAAGGCATCAAAGCATTGAAGGAATCTGCAAAACAGACACCGGCTCCAGCAGCAAGTGTAACTGG | |
| | CAGCAGGAGACGGCCAAGAGCACCCAGGGAAAGTGCCCAAGCCATAGAAGACCTAGCTGGCTTCAAAGAC | |
| | CCAGCAGCAGGTCACACTGAAGAATCAATGACTGATGACAAAACCACTAAAATACCCTGCAAATCATCAC | |
| | CAGAACTAGAAGACACCGCAACAAGCTCAAAGAGACGGCCCAGGACACGTGCCCAGAAAGTAGAAGTGAA | |
| | GGAGGAGCTGTTAGCAGTTGGCAAGCTCACACAAACCTCAGGGGAGACCACGCACACCGACAAAGAGCCG | |
| | GTAGGTGAGGGCAAAGGCACGAAAGCATTTAAGCAACCTGCAAAGCGGAAGCTGGACGCAGAAGATGTAA | |
| | TTGGCAGCAGGAGACAGCCAAGAGCACCTAAGGAAAAGGCCCAACCCCTGGAAGATCTGGCCAGCTTCCA | |
| | AGAGCTCTCTCAAACACCAGGCCACACTGAGGAACTGGCAAATGGTGCTGCTGATAGCTTTACAAGCGCT | |
| | CCAAAGCAAACACCTGACAGTGGAAAACCTCTAAAAATATCCAGAAGAGTTCTTCGGGCCCCTAAAGTAG | |
| | AACCCGTGGGAGACGTGGTAAGCACCAGAGACCCTGTAAAATCACAAAGCAAAAGCAACACTTCCCTGCC | |
| | CCCACTGCCCTTCAAGAGGGGAGGTGGCAAAGATGGAAGCGTCACGGGAACCAAGAGGCTGCGCTGCATG | |
| | CCAGCACCAGAGGAAATTGTGGAGGAGCTGCCAGCCAGCAAGAAGCAGAGGGTTGCTCCCAGGGCAAGAG | |
| | GCAAATCATCCGAACCCGTGGTCATCATGAAGAGAAGTTTGAGGACTTCTGCAAAAAGAATTGAACCTGC | |
| | GGAAGAGCTGAACAGCAACGACATGAAAACCAACAAAGAGGAACACAAATTACAAGACTCGGTCCCTGAA | |
| | AATAAGGGAATATCCCTGCGCTCCAGACGCCAAAATAAGACTGAGGCAGAACAGCAAATAACTGAGGTCT | |
| | TTGTATTAGCAGAAAGAATAGAAATAAACAGAAATGAAAAGAAGCCCATGAAGACCTCCCCAGAGATGGA | |
| | CATTCAGAATCCAGATGATGGAGCCCGGAAACCCATACCTAGAGACAAAGTCACTGAGAACAAAAGGTGC | |
| | TTGAGGTCTGCTAGACAGAATGAGAGCTCCCAGCCTAAGGTGGCAGAGGAGAGCGGAGGGCAGAAGAGTG | |
| | CGAAGGTTCTCATGCAGAATCAGAAAGGGAAAGGAGAAGCAGGAAATTCAGACTCCATGTGCCTGAGATC | |
| | AAGAAAGACAAAAAGCCAGCCTGCAGCAAGCACTTTGGAGAGCAAATCTGTGCAGAGAGTAACGCGGAGT | |
| | GTCAAGAGGTGTGCAGAAAATCCAAAGAAGGCTGAGGACAATGTGTGTGTCAAGAAAATAAGAACCAGAA | |
| | GTCATAGGGACAGTGAAGATATTTGACAGAAAAATCGAACTGGGAAAAATATAATAAAGTTAGTTTTGTG | |
| | ATAAGTTCTAGTGCAGTTTTTGTCATAAATTACAAGTGAATTCTGTAAGTAAGGCTGTCAGTCTGCTTAA | |
| | GGGAAGAAAACTTTGGATTTGCTGGGTCTGAATCGGCTTCATAAACTCCACTGGGAGCACTGCTGGGCTC | |
| | CTGGACTGAGAATAGTTGAACACCGGGGGCTTTGTGAAGGAGTCTGGGCCAAGGTTTGCCCTCAGCTTTG | |
| | CAGAATGAAGCCTTGAGGTCTGTCACCACCCACAGCCACCCTACAGCAGCCTTAACTGTGACACTTGCCA | |
| | CACTGTGTCGTCGTTTGTTTGCCTATGTCCTCCAGGGCACGGTGGCAGGAACAACTATCCTCGTCTGTCC | |
| | CAACACTGAGCAGGCACTCGGTAAACACGAATGAATGGATGAGCGCACGGATGAATGGAGCTTACAAGAT | |
| | CTGTCTTTCCAATGGCCGGGGGCATTTGGTCCCCAAATTAAGGCTATTGGACATCTGCACAGGACAGTCC | |
| | TATTTTTGATGTCCTTTCCTTTCTGAAAATAAAGTTTTGTGCTTTGGAGAATGACTCGTGAGCACATCTT | |
| | TAGGGACCAAGAGTGACTTTCTGTAAGGAGTGACTCGTGGCTTGCCTTGGTCTCTTGGGAATACTTTTCT | |
| | AACTAGGGTTGCTCTCACCTGAGACATTCTCCACCCGCGGAATCTCAGGGTCCCAGGCTGTGGGCCATCA | |
| | CGACCTCAAACTGGCTCCTAATCTCCAGCTTTCCTGTCATTGAAAGCTTCGGAAGTTTACTGGCTCTGCT | |
| | CCCGCCTGTTTTCTTTCTGACTCTATCTGGCAGCCCGATGCCACCCAGTACAGGAAGTGACACCAGTACT | |
| | CTGTAAAGCATCATCATCCTTGGAGAGACTGAGCACTCAGCACCTTCAGCCACGATTTCAGGATCGCTTC | |
| | CTTGTGAGCCGCTGCCTCCGAAATCTCCTTTGAAGCCCAGACATCTTTCTCCAGCTTCAGACTTGTAGAT | |
| | ATAACTCGTTCATCTTCATTTACTTTCCACTTTGCCCCCTGTCCTCTCTGTGTTCCCCAAATCAGAGAAT | |
| | AGCCCGCCATCCCCCAGGTCACCTGTCTGGATTCCTCCCCATTCACCCACCTTGCCAGGTGCAGGTGAGG | |
| | ATGGTGCACCAGACAGGGTAGCTGTCCCCCAAAATGTGCCCTGTGCGGGCAGTGCCCTGTCTCCACGTTT | |
| | GTTTCCCCAGTGTCTGGCGGGGAGCCAGGTGACATCATAAATACTTGCTGAATGAATGCAGAAATCAGCG | |
| | GTACTGACTTGTACTATATTGGCTGCCATGATAGGGTTCTCACAGCGTCATCCATGATCGTAAGGGAGAA | |
| | TGACATTCTGCTTGAGGGAGGGAATAGAAAGGGGCAGGGAGGGGACATCTGAGGGCTTCACAGGGCTGCA | |
| | AAGGGTACAGGGATTGCACCAGGGCAGAACAGGGGAGGGTGTTCAAGGAAGAGTGGCTCTTAGCAGAGGC | |
| | ACTTTGGAAGGTGTGAGGCATAAATGCTTCCTTCTACGTAGGCCAACCTCAAAACTTTCAGTAGGAATGT | |
| | TGCTATGATCAAGTTGTTCTAACACTTTAGACTTAGTAGTAATTATGAACCTCACATAGAAAAATTTCAT | |
| | CCAGCCATATGCCTGTGGAGTGGAATATTCTGTTTAGTAGAAAAATCCTTTAGAGTTCAGCTCTAACCAG | |
| | AAATCTTGCTGAAGTATGTCAGCACCTTTTCTCACCCTGGTAAGTACAGTATTTCAAGAGCACGCTAAGG | |
| | GTGGTTTTCATTTTACAGGGCTGTTGATGATGGGTTAAAAATGTTCATTTAAGGGCTACCCCCGTGTTTA | |
| | ATAGATGAACACCACTTCTACACAACCCTCCTTGGTACTGGGGGAGGGAGAGATCTGACAAATACTGCCC | |
| | ATTCCCCTAGGCTGACTGGATTTGAGAACAAATACCCACCCATTTCCACCATGGTATGGTAACTTCTCTG | |
| | AGCTTCAGTTTCCAAGTGAATTTCCATGTAATAGGACATTCCCATTAAATACAAGCTGTTTTTACTTTTT | |
| | CGCCTCCCAGGGCCTGTGGGATCTGGTCCCCCAGCCTCTCTTGGGCTTTCTTACACTAACTCTGTACCTA | |
| | CCATCTCCTGCCTCCCTTAGGCAGGCACCTCCAACCACCACACACTCCCTGCTGTTTTCCCTGCCTGGAA | |
| | CTTTCCCTCCTGCCCCACCAAGATCATTTCATCCAGTCCTGAGCTCAGCTTAAGGGAGGCTTCTTGCCTG | |
| | TGGGTTCCCTCACCCCCATGCCTGTCCTCCAGGCTGGGGCAGGTTCTTAGTTTGCCTGGAATTGTTCTGT | |
| | ACCTCTTTGTAGCACGTAGTGTTGTGGAAACTAAGCCACTAATTGAGTTTCTGGCTCCCCTCCTGGGGTT | |
| | GTAAGTTTTGTTCATTCATGAGGGCCGACTGCATTTCCTGGTTACTCTATCCCAGTGACCAGCCACAGGA | |
| | GATGTCCAATAAAGTATGTGATGAAATGGTCTTAAAAAAAAAAAAAA | |
| MLPH | GCGCCGGGACGTGGCCAGTTGCCCGCCTGCCCCGGAGAGCCAGGCGCTAACCAGCCGCTCTGCGCCCCGC | 248 |
| NM_024101 | GCCCTGCTTGCCCCCATTATCCAGCCTTGCCCCGGCGCCCTGACCTGACGCCCTGGCCTGACGCCCTGCT | |
| | TCGTCGCCTCCTTTCTCTCCCAGGTGCTGGACCAGGGACTGAGCGTCCCCCGGAGAGGGTCCGGTGTGAC | |
| | CCCGACAAGAAGCAGAAATGGGGAAGAAACTGGATCTTTCCAAGCTCACTGATGAAGAGGCCCAGCATGT | |
| | CTTGGAAGTTGTTCAACGAGATTTTGACCTCCGAAGGAAAGAAGAGGAACGGCTAGAGGCGTTGAAGGGC | |
| | AAGATTAAGAAGGAAAGCTCCAAGAGGGAGCTGCTTTCCGACACTGCCCATCTGAACGAGACCCACTGCG | |
| | CCCGCTGCCTGCAGCCCTACCAGCTGCTTGTGAATAGCAAAAGGCAGTGCCTGGAATGTGGCCTCTTCAC | |
| | CTGCAAAAGCTGTGGCCGCGTCCACCCGGAGGAGCAGGGCTGGATCTGTGACCCCTGCCATCTGGCCAGA | |
| | GTCGTGAAGATCGGCTCACTGGAGTGGTACTATGAGCATGTGAAAGCCCGCTTCAAGAGGTTCGGAAGTG | |
| | CCAAGGTCATCCGGTCCCTCCACGGGCGGCTGCAGGGTGGAGCTGGGCCTGAACTGATATCTGAAGAGAG | |
| | AAGTGGAGACAGCGACCAGACAGATGAGGATGGAGAACCTGGCTCAGAGGCCCAGGCCCAGGCCCAGCCC | |
| | TTTGGCAGCAAAAAAAAGCGCCTCCTCTCCGTCCACGACTTCGACTTCGAGGGAGACTCAGATGACTCCA | |
| | CTCAGCCTCAAGGTCACTCCCTGCACCTGTCCTCAGTCCCTGAGGCCAGGGACAGCCCACAGTCCCTCAC | |
| | AGATGAGTCCTGCTCAGAGAAGGCAGCCCCTCACAAGGCTGAGGGCCTGGAGGAGGCTGATACTGGGGCC | |
| | TCTGGGTGCCACTCCCATCCGGAAGAGCAGCCGACCAGCATCTCACCTTCCAGACACGGCGCCCTGGCTG | |
| | AGCTCTGCCCGCCTGGAGGCTCCCACAGGATGGCCCTGGGGACTGCTGCTGCACTCGGGTCGAATGTCAT | |
| | CAGGAATGAGCAGCTGCCCCTGCAGTACTTGGCCGATGTGGACACCTCTGATGAGGAAAGCATCCGGGCT | |
| | CACGTGATGGCCTCCCACCATTCCAAGCGGAGAGGCCGGGCGTCTTCTGAGAGTCAGATCTTTGAGCTGA | |
| | ATAAGCATATTTCAGCTGTGGAATGCCTGCTGACCTACCTGGAGAACACAGTTGTGCCTCCCTTGGCCAA | |
| | GGGTCTAGGTGCTGGAGTGCGCACGGAGGCCGATGTAGAGGAGGAGGCCCTGAGGAGGAAGCTGGAGGAG | |
| | CTGACCAGCAACGTCAGTGACCAGGAGACCTCGTCCGAGGAGGAGGAAGCCAAGGACGAAAAGGCAGAGC | |
| | CCAACAGGGACAAATCAGTTGGGCCTCTCCCCCAGGCGGACCCGGAGGTGGGCACGGCTGCCCATCAAAC | |
| | CAACAGACAGGAAAAAAGCCCCCAGGACCCTGGGGACCCCGTCCAGTACAACAGGACCACAGATGAGGAG | |
| | CTGTCAGAGCTGGAGGACAGAGTGGCAGTGACGGCCTCAGAAGTCCAGCAGGCAGAGAGCGAGGTTTCAG | |
| | ACATTGAATCCAGGATTGCAGCCCTGAGGGCCGCAGGGCTCACGGTGAAGCCCTCGGGAAAGCCCCGGAG | |
| | GAAGTCAAACCTCCCGATATTTCTCCCTCGAGTGGCTGGGAAACTTGGCAAGAGACCAGAGGACCCAAAT | |
| | GCAGACCCTTCAAGTGAGGCCAAGGCAATGGCTGTGCCCTATCTTCTGAGAAGAAAGTTCAGTAATTCCC | |
| | TGAAAAGTCAAGGTAAAGATGATGATTCTTTTGATCGGAAATCAGTGTACCGAGGCTCGCTGACACAGAG | |
| | AAACCCCAACGCGAGGAAAGGAATGGCCAGCCACACCTTCGCGAAACCTGTGGTGGCCCACCAGTCCTAA | |
| | CGGGACAGGACAGAGAGACAGAGCAGCCCTGCACTGTTTTCCCTCCACCACAGCCATCCTGTCCCTCATT | |
| | GGCTCTGTGCTTTCCACTATACACAGTCACCGTCCCAATGAGAAACAAGAAGGAGCACCCTCCACATGGA | |
| | CTCCCACCTGCAAGTGGACAGCGACATTCAGTCCTGCACTGCTCACCTGGGTTTACTGATGACTCCTGGC | |
| | TGCCCCACCATCCTCTCTGATCTGTGAGAAACAGCTAAGCTGCTGTGACTTCCCTTTAGGACAATGTTGT | |
| | GTAAATCTTTGAAGGACACACCGAAGACCTTTATACTGTGATCTTTTACCCCTTTCACTCTTGGCTTTCT | |
| | TATGTTGCTTTCATGAATGGAATGGAAAAAAGATGACTCAGTTAAGGCACCAGCCATATGTGTATTCTTG | |
| | ATGGTCTATATCGGGGTGTGAGCAGATGTTTGCGTATTTCTTGTGGGTGTGACTGGATATTAGACATCCG | |
| | GACAAGTGACTGAACTAATGATCTGCTGAATAATGAAGGAGGAATAGACACCCCAGTCCCCACCCTACGT | |
| | GCACCCGCTCTGCAAGTTCCCATGTGATCTGTAGACCAGGGGAAATTACACTGCGGTCAAGGGCAGAGCC | |
| | TGCACATGACAGCAAGTGAGCATTTGATAGATGCTCAGATGCTAGTGCAGAGAGCCTGCTGGGAGACGAA | |
| | GAGACAGCAGGCAGAGCTCCAGATGGGCAAGGAAGAGGCTTGGTTCTAGCCTGGCTCTGCCCCTCACTGC | |
| | AGTGGATCCAGTGGGGCAGAGGACAGAGGGTCACAACCAATGAGGGATGTCTGCCAAGGATGGGGGTGCA | |
| | GAGGCCACAGGAGTCAGCTTGCCACTCGCCCATTGGTTACATAGATGATCTCTCAGACAGGCTGGGACTC | |
| | AGAGTTATTTCCTAGTATCGGTGTGCCCCATCCAGTTTTAAGTGGAGCCCTCCAAGACTCTCCAGAGCTG | |
| | CCTTTGAACATCCTAACAGTAATCACATCTCACCCTCCCTGAGGTTCACTTTAGACAGGACCCAATGGCT | |
| | GCACTGCCTTTGTCAGAGGGGGTGCTGAGAGGAGTGGCTTCTTTTAGAATCAAACAGTAGAGACAAGAGT | |
| | CAAGCCTTGTGTCTTCAAGCATTGACCAAGTTAAGTGTTTCCTTCCCTCTCTCAATAAGACACTTCCAGG | |
| | AGCTTTCCAATCTCTCACTTAAAACTAAGGTTTGAATCTCAAAGTGTTGCTGGGAGGCTGATACTCCTGC | |
| | AACTTCAGGAGACCTGTGAGCACACATTAGCAGCTGTTTCTCTGACTCCTTGTGGCATCAGATAAAAACG | |
| | TGGGAGTTTTTCCATATAATTCCCAGCCTTACTTATAAATTCTATTCTTTGAAAAAATTATTCAGGCTAG | |
| | GTAAGGTGGCTCATACCTATAATCCCAGCCCTTTGAGAGGCCAAGGTGGGAGAATTGCTTGAGGCCAGGA | |
| | GTTTGAGACCTCCTGGGCAACATAGTGAGATCCCATCTCTACAAAAAACAAAACAAAAAAATTACCCAAG | |
| | CATGATGGTATATGCCTGTAGTCGTACCTACTTACTTAGGAGGCTGAGGCAGGAGGATCACTTGAGCCCT | |
| | GGAGGTTGGGGCTGCAGTGAGCCATGATCGCATCACTATACTCGAGCCTGGGCAACAGAGTGAGACCTTG | |
| | TCTCTTAAAAAAATTAATAATAAATAAATGAAAATAATTCTTCAGAAAAAAAAAAAAAAAA | |
| MMP11 | AAGCCCAGCAGCCCCGGGGCGGATGGCTCCGGCCGCCTGGCTCCGCAGCGCGGCCGCGCGCGCCCTCCTG | 249 |
| NM_005940 | CCCCCGATGCTGCTGCTGCTGCTCCAGCCGCCGCCGCTGCTGGCCCGGGCTCTGCCGCCGGACGCCCACC | |
| | ACCTCCATGCCGAGAGGAGGGGGCCACAGCCCTGGCATGCAGCCCTGCCCAGTAGCCCGGCACCTGCCCC | |
| | TGCCACGCAGGAAGCCCCCCGGCCTGCCAGCAGCCTCAGGCCTCCCCGCTGTGGCGTGCCCGACCCATCT | |
| | GATGGGCTGAGTGCCCGCAACCGACAGAAGAGGTTCGTGCTTTCTGGCGGGCGCTGGGAGAAGACGGACC | |
| | TCACCTACAGGATCCTTCGGTTCCCATGGCAGTTGGTGCAGGAGCAGGTGCGGCAGACGATGGCAGAGGC | |
| | CCTAAAGGTATGGAGCGATGTGACGCCACTCACCTTTACTGAGGTGCACGAGGGCCGTGCTGACATCATG | |
| | ATCGACTTCGCCAGGTACTGGCATGGGGACGACCTGCCGTTTGATGGGCCTGGGGGCATCCTGGCCCATG | |
| | CCTTCTTCCCCAAGACTCACCGAGAAGGGGATGTCCACTTCGACTATGATGAGACCTGGACTATCGGGGA | |
| | TGACCAGGGCACAGACCTGCTGCAGGTGGCAGCCCATGAATTTGGCCACGTGCTGGGGCTGCAGCACACA | |
| | ACAGCAGCCAAGGCCCTGATGTCCGCCTTCTACACCTTTCGCTACCCACTGAGTCTCAGCCCAGATGACT | |
| | GCAGGGGCGTTCAACACCTATATGGCCAGCCCTGGCCCACTGTCACCTCCAGGACCCCAGCCCTGGGCCC | |
| | CCAGGCTGGGATAGACACCAATGAGATTGCACCGCTGGAGCCAGACGCCCCGCCAGATGCCTGTGAGGCC | |
| | TCCTTTGACGCGGTCTCCACCATCCGAGGCGAGCTCTTTTTCTTCAAAGCGGGCTTTGTGTGGCGCCTCC | |
| | GTGGGGGCCAGCTGCAGCCCGGCTACCCAGCATTGGCCTCTCGCCACTGGCAGGGACTGCCCAGCCCTGT | |
| | GGACGCTGCCTTCGAGGATGCCCAGGGCCACATTTGGTTCTTCCAAGGTGCTCAGTACTGGGTGTACGAC | |
| | GGTGAAAAGCCAGTCCTGGGCCCCGCACCCCTCACCGAGCTGGGCCTGGTGAGGTTCCCGGTCCATGCTG | |
| | CCTTGGTCTGGGGTCCCGAGAAGAACAAGATCTACTTCTTCCGAGGCAGGGACTACTGGCGTTTCCACCC | |
| | CAGCACCCGGCGTGTAGACAGTCCCGTGCCCCGCAGGGCCACTGACTGGAGAGGGGTGCCCTCTGAGATC | |
| | GACGCTGCCTTCCAGGATGCTGATGGCTATGCCTACTTCCTGCGCGGCCGCCTCTACTGGAAGTTTGACC | |
| | CTGTGAAGGTGAAGGCTCTGGAAGGCTTCCCCCGTCTCGTGGGTCCTGACTTCTTTGGCTGTGCCGAGCC | |
| | TGCCAACACTTTCCTCTGACCATGGCTTGGATGCCCTCAGGGGTGCTGACCCCTGCCAGGCCACGAATAT | |
| | CAGGCTAGAGACCCATGGCCATCTTTGTGGCTGTGGGCACCAGGCATGGGACTGAGCCCATGTCTCCTCA | |
| | GGGGGATGGGGTGGGGTACAACCACCATGACAACTGCCGGGAGGGCCACGCAGGTCGTGGTCACCTGCCA | |
| | GCGACTGTCTCAGACTGGGCAGGGAGGCTTTGGCATGACTTAAGAGGAAGGGCAGTCTTGGGCCCGCTAT | |
| | GCAGGTCCTGGCAAACCTGGCTGCCCTGTCTCCATCCCTGTCCCTCAGGGTAGCACCATGGCAGGACTGG | |
| | GGGAACTGGAGTGTCCTTGCTGTATCCCTGTTGTGAGGTTCCTTCCAGGGGCTGGCACTGAAGCAAGGGT | |
| | GCTGGGGCCCCATGGCCTTCAGCCCTGGCTGAGCAACTGGGCTGTAGGGCAGGGCCACTTCCTGAGGTCA | |
| | GGTCTTGGTAGGTGCCTGCATCTGTCTGCCTTCTGGCTGACAATCCTGGAAATCTGTTCTCCAGAATCCA | |
| | GGCCAAAAAGTTCACAGTCAAATGGGGAGGGGTATTCTTCATGCAGGAGACCCCAGGCCCTGGAGGCTGC | |
| | AACATACCTCAATCCTGTCCCAGGCCGGATCCTCCTGAAGCCCTTTTCGCAGCACTGCTATCCTCCAAAG | |
| | CCATTGTAAATGTGTGTACAGTGTGTATAAACCTTCTTCTTCTTTTTTTTTTTTTAAACTGAGGATTGTC | |
| MYBL2 | TAGCAGCACACAAGGGTTCGTGTTTGTGGAACCAGGTAGCTTCCTTCAGAGCTGACATTTGCCCACAGCC | 250 |
| BX647151 | AGCCTGGCCCAGCCCCATACCACCAGCCCTGGCGCTCTGGGGCGTGAGGTGCCTTTTCTGCCCCCCTGCT | |
| | CTAGGGCAGGTGGAAATCACCCATGGTGGGTCTACATCTGATAGAAGCATCTTATAGTTCTGCTTCTGGA | |
| | CCAGACCATCCTGGGTTTTTCTCTGTTCTGCTGAAGGGTTCCCTCCACGTGTCCATCACCTCGGTGAACT | |
| | CTTGGGAGACCTGGGAAGATGCTGGCCTCACCTCTCGCCTCTCCTTTCCCTCATTGTGCTGCCACCATCC | |
| | TTCTCACACAGGCTCTCCAGGGAGAGCTGGGCAGGATGGGATCTTCCTGGGTTCCCACCTTGCTCCGTGC | |
| | CCCCTCTCACTGTTCCTGAAGTGTGGCCACGGACTGCCTTGTTTTCTGGAAAGTCCCAAGTCTGGACCAT | |
| | GACTGAGCAGCATTCTCGGCTATCTGCCACCTGTCTGGGGCTCCTGGCCCCTCTTAGACTCCCCTCTCCC | |
| | TTCTGTTTCCCCCGAGCCCCTGACTTGGACCTGCAGGGTGGGGAGAGGGATGGGACGAGAACCTGTGCTG | |
| | GGGCCAAAGGTCGCACTGGGGGAAGGTGGAGCCAGGGCAGCAGAGTGCCTGGCGTCGGCCCCTATCCTGT | |
| | CACTAGTTCCCCCGTTCTGGCCCCTGGCAGGTTTGTAACCCCAGATCAGAAGTACTCCATGGACAACACT | |
| | CCCCACACGCCAACCCCGTTCAAGAACGCCCTGGAGAAGTACGGACCCCTGAAGCCCCTGGTACGTGGTG | |
| | TGGTCACTGCCGTGGATCTCTGCACAGTGGGATCCCTTCGGTTCATCCAACCATGTTCAGTCCACAGGAC | |
| | CCTTCCCTCTGAGGTCTCATTTGATTCTTTCTCCTGAGAAGATGCAGAGATCCTGATAATATAAATGGGG | |
| | AAGCTGAGGCTGCTCTTTGTCACTTCCTCCGACTGCTCCTGAGCACCTGAGTTTGCAAGCACGCGCCGGC | |
| | TGGTGCTAGAGACATGGTGGTATCCCGTGACACTCAGCCTCAGGATGGGGGAGACTGATGTGAAATACAA | |
| | ATAACTTAAACACTTTCAGGCAAAGATAAGCACTGGGCCTAGTTCAGAGAAGTGGCAAATTGCTACTCTG | |
| | GCCTGTCTCTGACCAACTCCCAGTTCTCTACAGAGCACGGGAAAGCCCCTCGGGGACGTCTTTCCTGCAG | |
| | TGTGCAGGCTGCCCTTCTCCCCTGCTCTTCCCAGTTGATGGGATGGTTGTGTTTTCTCTATGAAAAAAGG | |
| | AGTTGGCACCTTGGGCTTTCTGAAACACACAGGTGTTTTAGAAATCAGTGGAGGGTGAGAGAAAGGCATG | |
| | GTTGTGGAGGCACTGGACTGTGAACAAGGTCTGCAGCGGGTCCCCCTGCTGTCTCTCTCTACTGCATGGA | |
| | GCCTCCTATGAAGCCCAAGGTGGCTGGGGGCTGAGGCTCCCTTGGGCCTGCCATGGAACTGATTCTGAGT | |
| | CAAGCAGACTTTCCACGGACCATGCTACATGAGCCGAGGTGAGGCACTAGTTAGTGCTCCTTTCCTGTTG | |
| | CAGTGGAGATTTGGCTCCTCTGTACTAAAATATCTGCATGCTCTCCAAACAGGTGTGAGGGCAAATCACA | |
| | TGACCTTGGCAGCTGTAATTAAAGTTTGTGGGGGCTTTTCGGATGACTTATGAGGAGTGGCTGTGATTCG | |
| | CACCTTTCACTCTTAGTAGCACTCGCCCTCCCCTGTTCTCTGTTGCCTGAAGCTGGAGAGGTCCTTGGAA | |
| | CCCCGAGGCCTGAGAAAGGGAAATGGGTTTGAGAGCCCCCATTAGTGTGGAACAAAGGGTTGAGTGAGCC | |
| | TGGGCTTTGAGCTGTCGGGGTCCTAATTCAGCAGCTGTGTGACTGTGTGCCAGGCTGTTGATCTCTGAGC | |
| | TTCTGTTTCTACCTGCTTAAAATGACGGTTACTGCACAGGGCTGTGTGAGGGTTACAGTGCGTCTCTGGG | |
| | CTGCTCCCAGCCATGGCAGGCCCCTGGGAATCAAGGTCATCAGCTGCTTGTCCAAGGCAGCAGTTAGTGG | |
| | TTGTGAATGGTGCGTGTGAGATCTGCATCCTGGCGTCAGGCCTCCTTCCTGCCTTACCCAGGACAGCCCA | |
| | GTTGCAGCTGGGTTGGTCCCACAGTCCCACACACACACAGCCCGAGTGTGGTGCCTCACGTGGGCTGCCC | |
| | CGTGCCTACCCACAGCCACAGACCCCGCACCTGGAGGAGGACTTGAAGGAGGTGCTGCGTTCTGAGGCTG | |
| | GCATCGAACTCATCATCGAGGACGACATCAGGCCCGAGAAGCAGAAGAGGAAGCCTGGGCTGCGGCGGAG | |
| | CCCCATCAAGAAAGTCCGGAAGTCTCTGGCTCTTGACATTGTGGATGAGGATGTGAAGCTGATGATGTCC | |
| | ACACTGCCCAAGTCTCTATCCTTGCCGACAACTGCCCCTTCAAACTCTTCCAGCCTCACCCTGTCAGGTA | |
| | TCAAAGAAGACAACAGCTTGCTCAACCAGGGCTTCTTGCAGGCCAAGCCCGAGAAGGCAGCAGTGGCCCA | |
| | GAAGCCCCGAAGCCACTTCACGACACCTGCCCCTATGTCCAGTGCCTGGAAGACGGTGGCCTGCGGGGGG | |
| | ACCAGGGACCAGCTTTTCATGCAGGAGAAAGCCCGGCAGCTCCTGGGCCGCCTGAAGCCCAGCCACACAT | |
| | CTCGGACCCTCATCTTGTCCTGAGGTGTTGAGGGTGTCACGAGCCCATTCACATGTTTACAGGGGTTGTG | |
| | GGGGCAGAGGGGGTCTGTGAATCTGAGAGTCATTCAGGTGACCTCCTGCAGGGAGCCTTCTGCCACCAGC | |
| | CCCTCCCCAGACTCTCAGGTGGAGGCAACAGGGCCATGTGCTGCCCTGTTGCCGAGCCCAGCTGTGGGCG | |
| | GCTCCTGGTGCTAACAACAAAGTTCCACTTCCAGGTCTGCCTGGTTCCCCCCCCAAGGCCACAGGGAGCT | |
| | CCGTCAGCTTCTCCCAAGCCCACGTCAGGCCTGGCCTCATCTCAGACCCTGCTTAGGATGGGGGATGTGG | |
| | CCAGGGGTGCTCCTGTGCTCACCCTCTCTTGGTGCATTTTTTTGGAAGAATAAAATTGCCTCTCTCTTTG | |
| | AAAAAAAAAAAAAAAAA | |
| MYC | GACCCCCGAGCTGTGCTGCTCGCGGCCGCCACCGCCGGGCCCCGGCCGTCCCTGGCTCCCCTCCTGCCTC | 251 |
| NM_002467 | GAGAAGGGCAGGGCTTCTCAGAGGCTTGGCGGGAAAAAGAACGGAGGGAGGGATCGCGCTGAGTATAAAA | |
| | GCCGGTTTTCGGGGCTTTATCTAACTCGCTGTAGTAATTCCAGCGAGAGGCAGAGGGAGCGAGCGGGCGG | |
| | CCGGCTAGGGTGGAAGAGCCGGGCGAGCAGAGCTGCGCTGCGGGCGTCCTGGGAAGGGAGATCCGGAGCG | |
| | AATAGGGGGCTTCGCCTCTGGCCCAGCCCTCCCGCTGATCCCCCAGCCAGCGGTCCGCAACCCTTGCCGC | |
| | ATCCACGAAACTTTGCCCATAGCAGCGGGCGGGCACTTTGCACTGGAACTTACAACACCCGAGCAAGGAC | |
| | GCGACTCTCCCGACGCGGGGAGGCTATTCTGCCCATTTGGGGACACTTCCCCGCCGCTGCCAGGACCCGC | |
| | TTCTCTGAAAGGCTCTCCTTGCAGCTGCTTAGACGCTGGATTTTTTTCGGGTAGTGGAAAACCAGCAGCC | |
| | TCCCGCGACGATGCCCCTCAACGTTAGCTTCACCAACAGGAACTATGACCTCGACTACGACTCGGTGCAG | |
| | CCGTATTTCTACTGCGACGAGGAGGAGAACTTCTACCAGCAGCAGCAGCAGAGCGAGCTGCAGCCCCCGG | |
| | CGCCCAGCGAGGATATCTGGAAGAAATTCGAGCTGCTGCCCACCCCGCCCCTGTCCCCTAGCCGCCGCTC | |
| | CGGGCTCTGCTCGCCCTCCTACGTTGCGGTCACACCCTTCTCCCTTCGGGGAGACAACGACGGCGGTGGC | |
| | GGGAGCTTCTCCACGGCCGACCAGCTGGAGATGGTGACCGAGCTGCTGGGAGGAGACATGGTGAACCAGA | |
| | GTTTCATCTGCGACCCGGACGACGAGACCTTCATCAAAAACATCATCATCCAGGACTGTATGTGGAGCGG | |
| | CTTCTCGGCCGCCGCCAAGCTCGTCTCAGAGAAGCTGGCCTCCTACCAGGCTGCGCGCAAAGACAGCGGC | |
| | AGCCCGAACCCCGCCCGCGGCCACAGCGTCTGCTCCACCTCCAGCTTGTACCTGCAGGATCTGAGCGCCG | |
| | CCGCCTCAGAGTGCATCGACCCCTCGGTGGTCTTCCCCTACCCTCTCAACGACAGCAGCTCGCCCAAGTC | |
| | CTGCGCCTCGCAAGACTCCAGCGCCTTCTCTCCGTCCTCGGATTCTCTGCTCTCCTCGACGGAGTCCTCC | |
| | CCGCAGGGCAGCCCCGAGCCCCTGGTGCTCCATGAGGAGACACCGCCCACCACCAGCAGCGACTCTGAGG | |
| | AGGAACAAGAAGATGAGGAAGAAATCGATGTTGTTTCTGTGGAAAAGAGGCAGGCTCCTGGCAAAAGGTC | |
| | AGAGTCTGGATCACCTTCTGCTGGAGGCCACAGCAAACCTCCTCACAGCCCACTGGTCCTCAAGAGGTGC | |
| | CACGTCTCCACACATCAGCACAACTACGCAGCGCCTCCCTCCACTCGGAAGGACTATCCTGCTGCCAAGA | |
| | GGGTCAAGTTGGACAGTGTCAGAGTCCTGAGACAGATCAGCAACAACCGAAAATGCACCAGCCCCAGGTC | |
| | CTCGGACACCGAGGAGAATGTCAAGAGGCGAACACACAACGTCTTGGAGCGCCAGAGGAGGAACGAGCTA | |
| | AAACGGAGCTTTTTTGCCCTGCGTGACCAGATCCCGGAGTTGGAAAACAATGAAAAGGCCCCCAAGGTAG | |
| | TTATCCTTAAAAAAGCCACAGCATACATCCTGTCCGTCCAAGCAGAGGAGCAAAAGCTCATTTCTGAAGA | |
| | GGACTTGTTGCGGAAACGACGAGAACAGTTGAAACACAAACTTGAACAGCTACGGAACTCTTGTGCGTAA | |
| | GGAAAAGTAAGGAAAACGATTCCTTCTAACAGAAATGTCCTGAGCAATCACCTATGAACTTGTTTCAAAT | |
| | GCATGATCAAATGCAACCTCACAACCTTGGCTGAGTCTTGAGACTGAAAGATTTAGCCATAATGTAAACT | |
| | GCCTCAAATTGGACTTTGGGCATAAAAGAACTTTTTTATGCTTACCATCTTTTTTTTTTCTTTAACAGAT | |
| | TTGTATTTAAGAATTGTTTTTAAAAAATTTTAAGATTTACACAATGTTTCTCTGTAAATATTGCCATTAA | |
| | ATGTAAATAACTTTAATAAAACGTTTATAGCAGTTACACAGAATTTCAATCCTAGTATATAGTACCTAGT | |
| | ATTATAGGTACTATAAACCCTAATTTTTTTTATTTAAGTACATTTTGCTTTTTAAAGTTGATTTTTTTCT | |
| | ATTGTTTTTAGAAAAAATAAAATAACTGGCAAATATATCATTGAGCCAAATCTTAAAAAAAAAAAAAAA | |
| NAT1 | GTGGGAGGATTGCATTCAGTCTAGTTCCTGGTTGCCGGCTGAAATAACCTGCTCTCCAAAATGTCCACAA | 252 |
| BC013732 | AAGTGACTTAAGTCAGGTTCCCCCAAACCAGACACCAAGACAAGAATCCATGTGTGTGTGACTGAAGGAA | |
| | GTGCTGGGAGAGCCCCAGCTGCAGCCTGGATGTGAACTGCAACTCCAAAGTGTGTCCAGACTCAAGGCAA | |
| | GGGCACTAGGCTTTCCAGACCTCCTACTAAGTCATTGATCCAGCACTGCCCTGCCAGGACATAAATCCCT | |
| | GGCACCTCTTGCTCTCTGCAAAGGAGGGCAAAGCAGCTTCAGGAGCCCTTGGGAGTCCTCCAAAGAGAGT | |
| | CTAGGGTACAGGTCCGAAAGTAGAAGAACACAGAAGGCAGGCCAGGGGCACTGTGAGATGGTAAAAGAGA | |
| | TCTGAAGGGATCCAGAATTCAAGCCAGGAAGAAGCAGCAATCTGTCTTCTGGATTAAAACTGAAGATCAA | |
| | CCTACTTTCAACTTACTAAGAAAGGGGATCATGGACATTGAAGCATATCTTGAAAGAATTGGCTATAAGA | |
| | AGTCTAGGAACAAATTGGACTTGGAAACATTAACTGATATTCTTCAACACCAGATCCGAGCTGTTCCCTT | |
| | TGAGAACCTTAACATCCATTGTGGGGATGCCATGGACTTAGGCTTAGAGGCCATTTTTGATCAAGTTGTG | |
| | AGAAGAAATCGGGGTGGATGGTGTCTCCAGGTCAATCATCTTCTGTACTGGGCTCTGACCACTATTGGTT | |
| | TTGAGACCACGATGTTGGGAGGGTATGTTTACAGCACTCCAGCCAAAAAATACAGCACTGGCATGATTCA | |
| | CCTTCTCCTGCAGGTGACCATTGATGGCAGGAACTACATTGTCGATGCTGGGTTTGGACGCTCATACCAG | |
| | ATGTGGCAGCCTCTGGAGTTAATTTCTGGGAAGGATCAGCCTCAGGTGCCTTGTGTCTTCCGTTTGACGG | |
| | AAGAGAATGGATTCTGGTATCTAGACCAAATCAGAAGGGAACAGTACATTCCAAATGAAGAATTTCTTCA | |
| | TTCTGATCTCCTAGAAGACAGCAAATACCGAAAAATCTACTCCTTTACTCTTAAGCCTCGAACAATTGAA | |
| | GATTTTGAGTCTATGAATACATACCTGCAGACATCTCCATCATCTGTGTTTACTAGTAAATCATTTTGTT | |
| | CCTTGCAGACCCCAGATGGGGTTCACTGTTTGGTGGGCTTCACCCTCACCCATAGGAGATTCAATTATAA | |
| | GGACAATACAGATCTAATAGAGTTCAAGACTCTGAGTGAGGAAGAAATAGAAAAAGTGCTGAAAAATATA | |
| | TTTAATATTTCCTTGCAGAGAAAGCTTGTGCCCAAACATGGTGATAGATTTTTTACTATTTAGAATAAGG | |
| | AGTAAAACAATCTTGTCTATTTGTCATCCAGCTCACCAGTTATCAACTGACGACCTATCATGTATCTTCT | |
| | GTACCCTTACCTTATTTTGAAGAAAATCCTAGACATCAAATCATTTCACCTATAAAAATGTCATCATATA | |
| | TAATTAAACAGCTTTTTAAAGAAACATAACCACAAACCTTTTCAAATAATAATAATAATAATAATAATAA | |
| | ATGTCTTTTAAAGATGGCCTGTGGTTATCTTGGAAATTGGTGATTTATGCTAGAAAGCTTTTAATGTTGG | |
| | TTTATTGTTGAATTCCTAGAAAAGTTTTATGGGTAGATGAGTAAATAAAATATTGTAAAAAAACTTATTG | |
| | TCTATAAAGTATATTAAAACATTGTTGGCTAATATAAAAAAAAAAAAAA | |
| ORC6L | GCGCGCGGGTTTCGTTGACCCGCGGCGTTCACGGGAATTGTTCGCTTTAGTGCCGGCGCCATGGGGTCGG | 253 |
| NM_014321 | AGCTGATCGGGCGCCTAGCCCCGCGCCTGGGCCTCGCCGAGCCCGACATGCTGAGGAAAGCAGAGGAGTA | |
| | CTTGCGCCTGTCCCGGGTGAAGTGTGTCGGCCTCTCCGCACGCACCACGGAGACCAGCAGTGCAGTCATG | |
| | TGCCTGGACCTTGCAGCTTCCTGGATGAAGTGCCCCTTGGACAGGGCTTATTTAATTAAACTTTCTGGTT | |
| | TGAACAAGGAGACATATCAGAGCTGTCTTAAATCTTTTGAGTGTTTACTGGGCCTGAATTCAAATATTGG | |
| | AATAAGAGACCTAGCTGTACAGTTTAGCTGTATAGAAGCAGTGAACATGGCTTCAAAGATACTAAAAAGC | |
| | TATGAGTCCAGTCTTCCCCAGACACAGCAAGTGGATCTTGACTTATCCAGGCCACTTTTCACTTCTGCTG | |
| | CACTGCTTTCAGCATGCAAGATTCTAAAGCTGAAAGTGGATAAAAACAAAATGGTAGCCACATCCGGTGT | |
| | AAAAAAAGCTATATTTGATCGACTGTGTAAACAACTAGAGAAGATTGGACAGCAGGTCGACAGAGAACCT | |
| | GGAGATGTAGCTACTCCACCACGGAAGAGAAAGAAGATAGTGGTTGAAGCCCCAGCAAAGGAAATGGAGA | |
| | AGGTAGAGGAGATGCCACATAAACCACAGAAAGATGAAGATCTGACACAGGATTATGAAGAATGGAAAAG | |
| | AAAAATTTTGGAAAATGCTGCCAGTGCTCAAAAGGCTACAGCAGAGTGATTTCAGCTTCCAAACTGGTAT | |
| | ACATTCCAAACTGATAGTACATTGCCATCTCCAGGAAGACTTGACGGCTTTGGGATTTTGTTTAAACTTT | |
| | TATAATAAGGATCCTAAGACTGTTGCCTTTAAATAGCAAAGCAGCCTACCTGGAGGCTAAGTCTGGGCAG | |
| | TGGGCTGGCCCCTGGTGTGAGCATTAGACCAGCCACAGTGCCTGATTGGTATAGCCTTATGTGCTTTCCT | |
| | ACAAAATGGAATTGGAGGCCGGGCGCAGTGGCTCACGCCTGTAATCCCAGCACTTTGGGAGGCCAAGGTG | |
| | GGTGGATCACCTGAGGTCAGGAGCTCGAGACCAGCCTGGCCAACATGGTGAAACCCCATCTCTACTAAAA | |
| | ATACAAAAATTAGCCAGGTGTGATGGTGCATGCCTGTAATCCCAGCTCCTCAGTAGGCTGAGACAGGAGC | |
| | ATCACTTGAACGTGGGAGGCAGAGGTTGCAGTGAGCCGAGATTGCACCACCGCACTCCAGCCTGGGTGAC | |
| | AGAGCGAGACTTATCTCATAAATAAATAGATAGATACTCCAGCCTGGGTGACAGAGCGAGACTTATAGAT | |
| | AGATAGATAGATAGATGGATAGATAGATAGATAGATAGATAGATAGATAAACGGAATTGGAGCCATTTTG | |
| | CTTTAAGTGAATGGCAGTCCCTTGTCTTATTCAGAATATAAAATTCAGTCTGAATGGCATCTTACAGATT | |
| | TTACTTCAATTTTTGTGTACGGTATTTTTTATTTGACTAAATCAATATATTGTACAGCCTAAGTTAATAA | |
| | ATGTTATTTATATATGCAAAAAAAAAAAAAAAAA | |
| PGR | AGTCCACAGCTGTCACTAATCGGGGTAAGCCTTGTTGTATTTGTGCGTGTGGGTGGCATTCTCAATGAGA | 254 |
| NM_000926 | ACTAGCTTCACTTGTCATTTGAGTGAAATCTACAACCCGAGGCGGCTAGTGCTCCCGCACTACTGGGATC | |
| | TGAGATCTTCGGAGATGACTGTCGCCCGCAGTACGGAGCCAGCAGAAGTCCGACCCTTCCTGGGAATGGG | |
| | CTGTACCGAGAGGTCCGACTAGCCCCAGGGTTTTAGTGAGGGGGCAGTGGAACTCAGCGAGGGACTGAGA | |
| | GCTTCACAGCATGCACGAGTTTGATGCCAGAGAAAAAGTCGGGAGATAAAGGAGCCGCGTGTCACTAAAT | |
| | TGCCGTCGCAGCCGCAGCCACTCAAGTGCCGGACTTGTGAGTACTCTGCGTCTCCAGTCCTCGGACAGAA | |
| | GTTGGAGAACTCTCTTGGAGAACTCCCCGAGTTAGGAGACGAGATCTCCTAACAATTACTACTTTTTCTT | |
| | GCGCTCCCCACTTGCCGCTCGCTGGGACAAACGACAGCCACAGTTCCCCTGACGACAGGATGGAGGCCAA | |
| | GGGCAGGAGCTGACCAGCGCCGCCCTCCCCCGCCCCCGACCCAGGAGGTGGAGATCCCTCCGGTCCAGCC | |
| | ACATTCAACACCCACTTTCTCCTCCCTCTGCCCCTATATTCCCGAAACCCCCTCCTCCTTCCCTTTTCCC | |
| | TCCTCCTGGAGACGGGGGAGGAGAAAAGGGGAGTCCAGTCGTCATGACTGAGCTGAAGGCAAAGGGTCCC | |
| | CGGGCTCCCCACGTGGCGGGCGGCCCGCCCTCCCCCGAGGTCGGATCCCCACTGCTGTGTCGCCCAGCCG | |
| | CAGGTCCGTTCCCGGGGAGCCAGACCTCGGACACCTTGCCTGAAGTTTCGGCCATACCTATCTCCCTGGA | |
| | CGGGCTACTCTTCCCTCGGCCCTGCCAGGGACAGGACCCCTCCGACGAAAAGACGCAGGACCAGCAGTCG | |
| | CTGTCGGACGTGGAGGGCGCATATTCCAGAGCTGAAGCTACAAGGGGTGCTGGAGGCAGCAGTTCTAGTC | |
| | CCCCAGAAAAGGACAGCGGACTGCTGGACAGTGTCTTGGACACTCTGTTGGCGCCCTCAGGTCCCGGGCA | |
| | GAGCCAACCCAGCCCTCCCGCCTGCGAGGTCACCAGCTCTTGGTGCCTGTTTGGCCCCGAACTTCCCGAA | |
| | GATCCACCGGCTGCCCCCGCCACCCAGCGGGTGTTGTCCCCGCTCATGAGCCGGTCCGGGTGCAAGGTTG | |
| | GAGACAGCTCCGGGACGGCAGCTGCCCATAAAGTGCTGCCCCGGGGCCTGTCACCAGCCCGGCAGCTGCT | |
| | GCTCCCGGCCTCTGAGAGCCCTCACTGGTCCGGGGCCCCAGTGAAGCCGTCTCCGCAGGCCGCTGCGGTG | |
| | GAGGTTGAGGAGGAGGATGGCTCTGAGTCCGAGGAGTCTGCGGGTCCGCTTCTGAAGGGCAAACCTCGGG | |
| | CTCTGGGTGGCGCGGCGGCTGGAGGAGGAGCCGCGGCTGTCCCGCCGGGGGCGGCAGCAGGAGGCGTCGC | |
| | CCTGGTCCCCAAGGAAGATTCCCGCTTCTCAGCGCCCAGGGTCGCCCTGGTGGAGCAGGACGCGCCGATG | |
| | GCGCCCGGGCGCTCCCCGCTGGCCACCACGGTGATGGATTTCATCCACGTGCCTATCCTGCCTCTCAATC | |
| | ACGCCTTATTGGCAGCCCGCACTCGGCAGCTGCTGGAAGACGAAAGTTACGACGGCGGGGCCGGGGCTGC | |
| | CAGCGCCTTTGCCCCGCCGCGGAGTTCACCCTGTGCCTCGTCCACCCCGGTCGCTGTAGGCGACTTCCCC | |
| | GACTGCGCGTACCCGCCCGACGCCGAGCCCAAGGACGACGCGTACCCTCTCTATAGCGACTTCCAGCCGC | |
| | CCGCTCTAAAGATAAAGGAGGAGGAGGAAGGCGCGGAGGCCTCCGCGCGCTCCCCGCGTTCCTACCTTGT | |
| | GGCCGGTGCCAACCCCGCAGCCTTCCCGGATTTCCCGTTGGGGCCACCGCCCCCGCTGCCGCCGCGAGCG | |
| | ACCCCATCCAGACCCGGGGAAGCGGCGGTGACGGCCGCACCCGCCAGTGCCTCAGTCTCGTCTGCGTCCT | |
| | CCTCGGGGTCGACCCTGGAGTGCATCCTGTACAAAGCGGAGGGCGCGCCGCCCCAGCAGGGCCCGTTCGC | |
| | GCCGCCGCCCTGCAAGGCGCCGGGCGCGAGCGGCTGCCTGCTCCCGCGGGACGGCCTGCCCTCCACCTCC | |
| | GCCTCTGCCGCCGCCGCCGGGGCGGCCCCCGCGCTCTACCCTGCACTCGGCCTCAACGGGCTCCCGCAGC | |
| | TCGGCTACCAGGCCGCCGTGCTCAAGGAGGGCCTGCCGCAGGTCTACCCGCCCTATCTCAACTACCTGAG | |
| | GCCGGATTCAGAAGCCAGCCAGAGCCCACAATACAGCTTCGAGTCATTACCTCAGAAGATTTGTTTAATC | |
| | TGTGGGGATGAAGCATCAGGCTGTCATTATGGTGTCCTTACCTGTGGGAGCTGTAAGGTCTTCTTTAAGA | |
| | GGGCAATGGAAGGGCAGCACAACTACTTATGTGCTGGAAGAAATGACTGCATCGTTGATAAAATCCGCAG | |
| | AAAAAACTGCCCAGCATGTCGCCTTAGAAAGTGCTGTCAGGCTGGCATGGTCCTTGGAGGTCGAAAATTT | |
| | AAAAAGTTCAATAAAGTCAGAGTTGTGAGAGCACTGGATGCTGTTGCTCTCCCACAGCCAGTGGGCGTTC | |
| | CAAATGAAAGCCAAGCCCTAAGCCAGAGATTCACTTTTTCACCAGGTCAAGACATACAGTTGATTCCACC | |
| | ACTGATCAACCTGTTAATGAGCATTGAACCAGATGTGATCTATGCAGGACATGACAACACAAAACCTGAC | |
| | ACCTCCAGTTCTTTGCTGACAAGTCTTAATCAACTAGGCGAGAGGCAACTTCTTTCAGTAGTCAAGTGGT | |
| | CTAAATCATTGCCAGGTTTTCGAAACTTACATATTGATGACCAGATAACTCTCATTCAGTATTCTTGGAT | |
| | GAGCTTAATGGTGTTTGGTCTAGGATGGAGATCCTACAAACACGTCAGTGGGCAGATGCTGTATTTTGCA | |
| | CCTGATCTAATACTAAATGAACAGCGGATGAAAGAATCATCATTCTATTCATTATGCCTTACCATGTGGC | |
| | AGATCCCACAGGAGTTTGTCAAGCTTCAAGTTAGCCAAGAAGAGTTCCTCTGTATGAAAGTATTGTTACT | |
| | TCTTAATACAATTCCTTTGGAAGGGCTACGAAGTCAAACCCAGTTTGAGGAGATGAGGTCAAGCTACATT | |
| | AGAGAGCTCATCAAGGCAATTGGTTTGAGGCAAAAAGGAGTTGTGTCGAGCTCACAGCGTTTCTATCAAC | |
| | TTACAAAACTTCTTGATAACTTGCATGATCTTGTCAAACAACTTCATCTGTACTGCTTGAATACATTTAT | |
| | CCAGTCCCGGGCACTGAGTGTTGAATTTCCAGAAATGATGTCTGAAGTTATTGCTGCACAATTACCCAAG | |
| | ATATTGGCAGGGATGGTGAAACCCCTTCTCTTTCATAAAAAGTGAATGTCATCTTTTTCTTTTAAAGAAT | |
| | TAAATTTTGTGGTATGTCTTTTTGTTTTGGTCAGGATTATGAGGTCTTGAGTTTTTATAATGTTCTTCTG | |
| | AAAGCCTTACATTTATAACATCATAGTGTGTAAATTTAAAAGAAAAATTGTGAGGTTCTAATTATTTTCT | |
| | TTTATAAAGTATAATTAGAATGTTTAACTGTTTTGTTTACCCATATTTTCTTGAAGAATTTACAAGATTG | |
| | AAAAAGTACTAAAATTGTTAAAGTAAACTATCTTATCCATATTATTTCATACCATGTAGGTGAGGATTTT | |
| | TAACTTTTGCATCTAACAAATCATCGACTTAAGAGAAAAAATCTTACATGTAATAACACAAAGCTATTAT | |
| | ATGTTATTTCTAGGTAACTCCCTTTGTGTCAATTATATTTCCAAAAATGAACCTTTAAAATGGTATGCAA | |
| | AATTTTGTCTATATATATTTGTGTGAGGAGGAAATTCATAACTTTCCTCAGATTTTCAAAAGTATTTTTA | |
| | ATGCAAAAAATGTAGAAAGAGTTTAAAACCACTAAAATAGATTGATGTTCTTCAAACTAGGCAAAACAAC | |
| | TCATATGTTAAGACCATTTTCCAGATTGGAAACACAAATCTCTTAGGAAGTTAATAAGTAGATTCATATC | |
| | ATTATGCAAATAGTATTGTGGGTTTTGTAGGTTTTTAAAATAACCTTTTTTGGGGAGAGAATTGTCCTCT | |
| | AATGAGGTATTGCGAGTGGACATAAGAAATCAGAAGATTATGGCCTAACTGTACTCCTTACCAACTGTGG | |
| | CATGCTGAAAGTTAGTCACTCTTACTGATTCTCAATTCTCTCACCTTTGAAAGTAGTAAAATATCTTTCC | |
| | TGCCAATTGCTCCTTTGGGTCAGAGCTTATTAACATCTTTTCAAATCAAAGGAAAGAAGAAAGGGAGAGG | |
| | AGGAGGAGGGAGGTATCAATTCACATACCTTTCTCCTCTTTATCCTCCACTATCATGAATTCATATTATG | |
| | TTTCAGCCATGCAAATCTTTTTACCATGAAATTTCTTCCAGAATTTTCCCCCTTTGACACAAATTCCATG | |
| | CATGTTTCAACCTTCGAGACTCAGCCAAATGTCATTTCTGTAAAATCTTCCCTGAGTCTTCCAAGCAGTA | |
| | ATTTGCCTTCTCCTAGAGTTTACCTGCCATTTTGTGCACATTTGAGTTACAGTAGCATGTTATTTTACAA | |
| | TTGTGACTCTCCTGGGAGTCTGGGAGCCATATAAAGTGGTCAATAGTGTTTGCTGACTGAGAGTTGAATG | |
| | ACATTTTCTCTCTGTCTTGGTATTACTGTAGATTTCGATCATTCTTTGGTTACATTTCTGCATATTTCTG | |
| | TACCCATGACTTTATCACTTTCTTCTCCCATGCTTTATCTCCATCAATTATCTTCATTACTTTTAAATTT | |
| | TCCACCTTTGCTTCCTACTTTGTGAGATCTCTCCCTTTACTGACTATAACATAGAAGAATAGAAGTGTAT | |
| | TTTATGTGTCTTAAGGACAATACTTTAGATTCCTTGTTCTAAGTTTTTAAACTGAATGAATGGAATATTA | |
| | TTTCTCTCCCTAAGCAAAATTCCACAAAACAATTATTTCTTATGTTTATGTAGCCTTAAATTGTTTTGTA | |
| | CTGTAAACCTCAGCATAAAAACTTTCTTCATTTCTAATTTCATTCAACAAATATTGATTGAATACCTGGT | |
| | ATTAGCACAAGAAAAATGTGCTAATAAGCCTTATGAGAATTTGGAGCTGAAGAAAGACATATAACTCAGG | |
| | AAAGTTACAGTCCAGTAGTAGGTATAAATTACAGTGCCTGATAAATAGGCATTTTAATATTTGTACACTC | |
| | AACGTATACTAGGTAGGTGCAAAACATTTACATATAATTTTACTGATACCCATGCAGCACAAAGGTACTA | |
| | ACTTTAAATATTAAATAACACCTTTATGTGTCAGTAATTCATTTGCATTAAATCTTATTGAAAAGGCTTT | |
| | CAATATATTTTCCCCACAAATGTCATCCCAAGAAAAAAGTATTTTTAACATCTCCCAAATATAATAGTTA | |
| | CAGGAAATCTACCTCTGTGAGAGTGACACCTCTCAGAATGAACTGTGTGACACAAGAAAATGAATGTAGG | |
| | TCTATCCAAAAAAAACCCCAAGAAACAAAAACAATATTATTAGCCCTTTATGCTTAAGTGATGGACTCAG | |
| | GGAACAGTTGATGTTGTGATCATTTTATTATCTGATTCTTGTTACTTTGAATTAAACCAATATTTTGATG | |
| | ATATAAATCATTTCCACCAGCATATATTTAATTTCCATAATAACTTTAAAATTTTCTAATTTCACTCAAC | |
| | TATGAGGGAATAGAATGTGGTGGCCACAGGTTTGGCTTTTGTTAAAATGTTTGATATCTTCGATGTTGAT | |
| | CTCTGTCTGCAATGTAGATGTCTAAACACTAGGATTTAATATTTAAGGCTAAGCTTTAAAAATAAAGTAC | |
| | CTTTTTAAAAAGAATATGGCTTCACCAAATGGAAAATACCTAATTTCTAAATCTTTTTCTCTACAAAGTC | |
| | CTATCTACTAATGTCTCCATTACTATTTAGTCATCATAACCATTATCTTCATTTTACATGTCGTGTTCTT | |
| | TCTGGTAGCTCTAAAATGACACTAAATCATAAGAAGACAGGTTACATATCAGGAAATACTTGAAGGTTAC | |
| | TGAAATAGATTCTTGAGTTAATGAAAATATTTTCTGTAAAAAGGTTTGAAAAGCCATTTGAGTCTAAAGC | |
| | ATTATACCTCCATTATCAGTAGTTATGTGACAATTGTGTGTGTGTTTAATGTTTAAAGATGTGGCACTTT | |
| | TTAATAAGGCAATGCTATGCTATTTTTTCCCATTTAACATTAAGATAATTTATTGCTATACAGATGATAT | |
| | GGAAATATGATGAACAATATTTTTTTTGCCAAAACTATGCCTTGTAAGTAGCCATGGAATGTCAACCTGT | |
| | AACTTAAATTATCCACAGATAGTCATGTGTTTGATGATGGGCACTGTGGAGATAACTGACATAGGACTGT | |
| | GCCCCCCTTCTCTGCCACTTACTAGCTGGATGAGATTAAGCAAGTCATTTAACTGCTCTGATTAAACCTG | |
| | CCTTTCCCAAGTGCTTTGTAATGAATAGAAATGGAAACCAAAAAAAACGTATACAGGCCTTCAGAAATAG | |
| | TAATTGCTACTATTTTGTTTTCATTAAGCCATAGTTCTGGCTATAATTTTATCAAACTCACCAGCTATAT | |
| | TCTACAGTGAAAGCAGGATTCTAGAAAGTCTCACTGTTTTATTTATGTCACCATGTGCTATGATATATTT | |
| | GGTTGAATTCATTTGAAATTAGGGCTGGAAGTATTCAAGTAATTTCTTCTGCTGAAAAAATACAGTGTTT | |
| | TGAGTTTAGGGCCTGTTTTATCAAAGTTCTAAAGAGCCTATCACTCTTCCATTGTAGACATTTTAAAATA | |
| | ATGACACTGATTTTAACATTTTTAAGTGTCTTTTTAGAACAGAGAGCCTGACTAGAACACAGCCCCTCCA | |
| | AAAACCCATGCTCAAATTATTTTTACTATGGCAGCAATTCCACAAAAGGGAACAATGGGTTTAGAAATTA | |
| | CAATGAAGTCATCAACCCAAAAAACATCCCTATCCCTAAGAAGGTTATGATATAAAATGCCCACAAGAAA | |
| | TCTATGTCTGCTTTAATCTGTCTTTTATTGCTTTGGAAGGATGGCTATTACATTTTTAGTTTTTGCTGTG | |
| | AATACCTGAGCAGTTTCTCTCATCCATACTTATCCTTCACACATCAGAAGTCAGGATAGAATATGAATCA | |
| | TTTTAAAAACTTTTACAACTCCAGAGCCATGTGCATAAGAAGCATTCAAAACTTGCCAAAACATACATTT | |
| | TTTTTCAAATTTAAAGATACTCTATTTTTGTATTCAATAGCTCAACAACTGTGGTCCCCACTGATAAAGT | |
| | GAAGTGGACAAGGAGACAAGTAATGGCATAAGTTTGTTTTTCCCAAAGTATGCCTGTTCAATAGCCATTG | |
| | GATGTGGGAAATTTCTACATCTCTTAAAATTTTACAGAAAATACATAGCCAGATAGTCTAGCAAAAGTTC | |
| | ACCAAGTCCTAAATTGCTTATCCTTACTTCACTAAGTCATGAAATCATTTTAATGAAAAGAACATCACCT | |
| | AGGTTTTGTGGTTTCTTTTTTTCTTATTCATGGCTGAGTGAAAACAACAATCTCTGTTTCTCCCTAGCAT | |
| | CTGTGGACTATTTAATGTACCATTATTCCACACTCTATGGTCCTTACTAAATACAAAATTGAACAAAAAG | |
| | CAGTAAAACAACTGACTCTTCACCCATATTATAAAATATAATCCAAGCCAGATTAGTCAACATCCATAAG | |
| | ATGAATCCAAGCTGAACTGGGCCTAGATTATTGAGTTCAGGTTGGATCACATCCCTATTTATTAATAAAC | |
| | TTAGGAAAGAAGGCCTTACAGACCATCAGTTAGCTGGAGCTAATAGAACCTACACTTCTAAAGTTCGGCC | |
| | TAGAATCAATGTGGCCTTAAAAGCTGAAAAGAAGCAGGAAAGAACAGTTTTCTTCAATAATTTGTCCACC | |
| | CTGTCACTGGAGAAAATTTAAGAATTTGGGGGTGTTGGTAGTAAGTTAAACACAGCAGCTGTTCATGGCA | |
| | GAAATTATTCAATACATACCTTCTCTGAATATCCTATAACCAAAGCAAAGAAAAACACCAAGGGGTTTGT | |
| | TCTCCTCCTTGGAGTTGACCTCATTCCAAGGCAGAGCTCAGGTCACAGGCACAGGGGCTGCGCCCAAGCT | |
| | TGTCCGCAGCCTTATGCAGCTGTGGAGTCTGGAAGACTGTTGCAGGACTGCTGGCCTAGTCCCAGAATGT | |
| | CAGCCTCATTTTCGATTTACTGGCTCTTGTTGCTGTATGTCATGCTGACCTTATTGTTAAACACAGGTTT | |
| | GTTTGCTTTTTTTCCACTCATGGAGACATGGGAGAGGCATTATTTTTAAGCTGGTTGAAAGCTTTAACCG | |
| | ATAAAGCATTTTTAGAGAAATGTGAATCAGGCAGCTAAGAAAGCATACTCTGTCCATTACGGTAAAGAAA | |
| | ATGCACAGATTATTAACTCTGCAGTGTGGCATTAGTGTCCTGGTCAATATTCGGATAGATATGAATAAAA | |
| | TATTTAAATGGTATTGTAAATAGTTTTCAGGACATATGCTATAGCTTATTTTTATTATCTTTTGAAATTG | |
| | CTCTTAATACATCAAATCCTGATGTATTCAATTTATCAGATATAAATTATTCTAAATGAAGCCCAGTTAA | |
| | ATGTTTTTGTCTTGTCAGTTATATGTTAAGTTTCTGATCTCTTTGTCTATGACGTTTACTAATCTGCATT | |
| | TTTACTGTTATGAATTATTTTAGACAGCAGTGGTTTCAAGCTTTTTGCCACTAAAAATACCTTTTATTTT | |
| | CTCCTCCCCCAGAAAAGTCTATACCTTGAAGTATCTATCCACCAAACTGTACTTCTATTAAGAAATAGTT | |
| | ATTGTGTTTTCTTAATGTTTTGTTATTCAAAGACATATCAATGAAAGCTGCTGAGCAGCATGAATAACAA | |
| | TTATATCCACACAGATTTGATATATTTTGTGCAGCCTTAACTTGATAGTATAAAATGTCATTGCTTTTTA | |
| | AATAATAGTTAGTCAATGGACTTCTATCATAGCTTTCCTAAACTAGGTTAAGATCCAGAGCTTTGGGGTC | |
| | ATAATATATTACATACAATTAAGTTATCTTTTTCTAAGGGCTTTAAAATTCATGAGAATAACCAAAAAAG | |
| | GTATGTGGAGAGTTAATACAAACATACCATATTCTTGTTGAAACAGAGATGTGGCTCTGCTTGTTCTCCA | |
| | TAAGGTAGAAATACTTTCCAGAATTTGCCTAAACTAGTAAGCCCTGAATTTGCTATGATTAGGGATAGGA | |
| | AGAGATTTTCACATGGCAGACTTTAGAATTCTTCACTTTAGCCAGTAAAGTATCTCCTTTTGATCTTAGT | |
| | ATTCTGTGTATTTTAACTTTTCTGAGTTGTGCATGTTTATAAGAAAAATCAGCACAAAGGGTTTAAGTTA | |
| | AAGCCTTTTTACTGAAATTTGAAAGAAACAGAAGAAAATATCAAAGTTCTTTGTATTTTGAGAGGATTAA | |
| | ATATGATTTACAAAAGTTACATGGAGGGCTCTCTAAAACATTAAATTAATTATTTTTTGTTGAAAAGTCT | |
| | TACTTTAGGCATCATTTTATTCCTCAGCAACTAGCTGTGAAGCCTTTACTGTGCTGTATGCCAGTCACTC | |
| | TGCTAGATTGTGGAGATTACCAGTGTTCCCGTCTTCTCCGAGCTTAGAGTTGGATGGGGAATAAAGACAG | |
| | GTAAACAGATAGCTACAATATTGTACTGTGAATGCTTATGCTGGAGGAAGTACAGGGAACTATTGGAGCA | |
| | CCTAAGAGGAGCACCTACCTTGAATTTAGGGGTTAGCAGAGGCATCCTGAAAAAAGTCAAAGCTAAGCCA | |
| | CAATCTATAAGCAGTTTAGGAATTAGCAGAACGTGCGTGGTGAGGAGATGCCAAAGGCAAGAAGAGAAGA | |
| | GTATTCCAAACAGGAGGGATTCCAAAGAGAGAAGAGTATCCCAAACAACATTTGCACAAACCTGATGGGG | |
| | AGAGAGAATGTGGGGTGGGGATGGATGATGAGACTGAAGAAGAAAGCCAGGTCTAGATAATCAGTGGCCT | |
| | TGTACACCATGTTAAAGAGTGTAGACTTGATTCTGTTGTAAACAGGAAAGCAGCACAATTCATATGAATA | |
| | TTTTAGAAGACTCCCACTGGAATATGGAGAATAAAGTTGGAGATGACTAATCCTGGAAGCAGGGAGAACA | |
| | TTTTTGAGGAAGTTGCACTATTTTGGTGAAAATGATGATCATAAACATGAAGAATTGTAGGTGATCATGA | |
| | CCTCCTCTCTAATTTTCCAGAAGGGTTTTGGAAGATATAACATAGGAACATTGACAGGACTGACGAAAGG | |
| | AGATGAAATACACCATATAAATTGTCAAACACAAGGCCAGATGTCTAATTATTTTGCTTATGTGTTGAAA | |
| | TTACAAATTTTTCATCAGGAAACCAAAAACTACAAAACTTAGTTTTCCCAAGTCCCAGAATTCTATCTGT | |
| | CCAAACAATCTGTACCACTCCACCTATATCCCTACCTTTGCATGTCTGTCCAACCTCAAAGTCCAGGTCT | |
| | ATACACACGGGTAAGACTAGAGCAGTTCAAGTTTCAGAAAATGAGAAAGAGGAACTGAGTTGTGCTGAAC | |
| | CCATACAAAATAAACACATTCTTTGTATAGATTCTTGGAACCTCGAGAGGAATTCACCTAACTCATAGGT | |
| | ATTTGATGGTATGAATCCATGGCTGGGCTCGGCTTTTAAAAAGCCTTATCTGGGATTCCTTCTATGGAAC | |
| | CAAGTTCCATCAAAGCCCATTTAAAAGCCTACATTAAAAACAAAATTCTTGCTGCATTGTATACAAATAA | |
| | TGATGTCATGATCAAATAATCAGATGCCATTATCAAGTGGAATTACAAAATGGTATACCCACTCCAAAAA | |
| | AAAAAAAAAAGCTAAATTCTCAGTAGAACATTGTGACTTCATGAGCCCTCCACAGCCTTGGAGCTGAGGA | |
| | GGGAGCACTGGTGAGCAGTAGGTTGAAGAGAAAACTTGGCGCTTAATAATCTATCCATGTTTTTTCATCT | |
| | AAAAGAGCCTTCTTTTTGGATTACCTTATTCAATTTCCATCAAGGAAATTGTTAGTTCCACTAACCAGAC | |
| | AGCAGCTGGGAAGGCAGAAGCTTACTGTATGTACATGGTAGCTGTGGGAAGGAGGTTTCTTTCTCCAGGT | |
| | CCTCACTGGCCATACACCAGTCCCTTGTTAGTTATGCCTGGTCATAGACCCCCGTTGCTATCATCTCATA | |
| | TTTAAGTCTTTGGCTTGTGAATTTATCTATTCTTTCAGCTTCAGCACTGCAGAGTGCTGGGACTTTGCTA | |
| | ACTTCCATTTCTTGCTGGCTTAGCACATTCCTCATAGGCCCAGCTCTTTTCTCATCTGGCCCTGCTGTGG | |
| | AGTCACCTTGCCCCTTCAGGAGAGCCATGGCTTACCACTGCCTGCTAAGCCTCCACTCAGCTGCCACCAC | |
| | ACTAAATCCAAGCTTCTCTAAGATGTTGCAGACTTTACAGGCAAGCATAAAAGGCTTGATCTTCCTGGAC | |
| | TTCCCTTTACTTGTCTGAATCTCACCTCCTTCAACTTTCAGTCTCAGAATGTAGGCATTTGTCCTCTTTG | |
| | CCCTACATCTTCCTTCTTCTGAATCATGAAAGCCTCTCACTTCCTCTTGCTATGTGCTGGAGGCTTCTGT | |
| | CAGGTTTTAGAATGAGTTCTCATCTAGTCCTAGTAGCTTTTGATGCTTAAGTCCACCTTTTAAGGATACC | |
| | TTTGAGATTTAGACCATGTTTTTCGCTTGAGAAAGCCCTAATCTCCAGACTTGCCTTTCTGTGGATTTCA | |
| | AAGACCAACTGAGGAAGTCAAAAGCTGAATGTTGACTTTCTTTGAACATTTCCGCTATAACAATTCCAAT | |
| | TCTCCTCAGAGCAATATGCCTGCCTCCAACTGACCAGGAGAAAGGTCCAGTGCCAAAGAGAAAAACACAA | |
| | AGATTAATTATTTCAGTTGAGCACATACTTTCAAAGTGGTTTGGGTATTCATATGAGGTTTTCTGTCAAG | |
| | AGGGTGAGACTCTTCATCTATCCATGTGTGCCTGACAGTTCTCCTGGCACTGGCTGGTAACAGATGCAAA | |
| | ACTGTAAAAATTAAGTGATCATGTATTTTAACGATATCATCACATACTTATTTTCTATGTAATGTTTTAA | |
| | ATTTCCCCTAACATACTTTGACTGTTTTGCACATGGTAGATATTCACATTTTTTTGTGTTGAAGTTGATG | |
| | CAATCTTCAAAGTTATCTACCCCGTTGCTTATTAGTAAAACTAGTGTTAATACTTGGCAAGAGATGCAGG | |
| | GAATCTTTCTCATGACTCACGCCCTATTTAGTTATTAATGCTACTACCCTATTTTGAGTAAGTAGTAGGT | |
| | CCCTAAGTACATTGTCCAGAGTTATACTTTTAAAGATATTTAGCCCCATATACTTCTTGAATCTAAAGTC | |
| | ATACACCTTGCTCCTCATTTCTGAGTGGGAAAGACATTTGAGAGTATGTTGACAATTGTTCTGAAGGTTT | |
| | TTGCCAAGAAGGTGAAACTGTCCTTTCATCTGTGTATGCCTGGGGCTGGGTCCCTGGCAGTGATGGGGTG | |
| | ACAATGCAAAGCTGTAAAAACTAGGTGCTAGTGGGCACCTAATATCATCATCATATACTTATTTTCAAGC | |
| | TAATATGCAAAATCCCATCTCTGTTTTTAAACTAAGTGTAGATTTCAGAGAAAATATTTTGTGGTTCACA | |
| | TAAGAAAACAGTCTACTCAGCTTGACAAGTGTTTTATGTTAAATTGGCTGGTGGTTTGAAATGAATCATC | |
| | TTCACATAATGTTTTCTTTAAAAATATTGTGAATTTAACTCTAATTCTTGTTATTCTGTGTGATAATAAA | |
| | GAATAAACTAATTTCTA | |
| PHGDH | ATTCTATGCTGCAGCCTAAGCATCATTCCTCTTCTCTTCTTAGTGGAGATAAAATTACCCACTGCTCTCC | 255 |
| AK093306 | TTACATTTACTTTGTCCATATTTGCTCCTATGCTCTAGGCTCGTGCACAACAAACACAGTGTGGGCCCTT | |
| | ACCCTAGAAGCCAACTTCTCATGACCTTTCTCTATCTCCAGAATCCATGCAGTGGGAATGAAGGTAAAAG | |
| | AAGGTTTTCATGGGATCCAGCTGAGAGCTCTACGGGGAAAATGGATCTGAGGAGCCATGTGCTCCATCTC | |
| | TTTTATTTTACAGGTAGAGACTAGGGGTATAGAGTGAGGTGAATTACCGCAGTGACCCACACATTGTTGG | |
| | CAGACCTAGGATTAGAACTCTGTCTTCCTGGTTCCCAGCTTGGTGCTTTTGAAAGCATACTTGCTGCTTT | |
| | CTTACCGGCCTGGTGTCTGCCACTTTGGGACAGAGTGTGGACTTGCTCACCTGCCCCATTTCTTAGGGAT | |
| | TCTCATTCTGTGTTTGAGCAAGAATATTCTTATTCTGGAAAGAACCACATACCACAGGATTCTGGGTGAG | |
| | CATAAGGAAGATTGTCTTGGGGATCTGACTTAGCTCACGTATAGTGGCTATGATGAATTCAGTGTCTTAT | |
| | TTTTTGCATATGTATATTTTTAGTCTAATATTGCCTGGGTGTCTGAGCAAGTCTAGATGAATTTAATTGC | |
| | TCTCATTTTTCCCCTGCCCCTCTTCCTTTGGTCTCTCTTTTAGGAAATGTTTTTCTTTCAACATTCGTTT | |
| | CATTCATTATTTACTCATTCGGCCAACCAACATTTATTGAGTGCCTTCCCTGTATCAGGGACAGGGGCTT | |
| | ACAAAGTAGAATTTGATCCCACCTCTGCCCTCAGTAGCTCAGTGTCTAATGGAGGTAGTGATGTTCATTA | |
| | AGCGTCGCCAGATACTGTGCTAGGTGCTGTGCCTGTTCTCTCTCGCTTGTTCCTCACACACTTGAGAAGG | |
| | CCGAAGCTGATTCATAGCTTGGAAGGCAGGGGCCTTGGATTTGAACCCAGGCCTGACCAATGGCAGAACC | |
| | TATCAGATGTGTGGACAGATGACATTGCCTTTCTTTCTTTGGATATATCAAAATCAGCCAGCAGGCAGGA | |
| | ACTCCCATTTTGAGCAAGCAATGTGCAGGAATGATAGGGTATACAGAGAGGAACAGGAGATGGCCCCTGA | |
| | CTTCCAGCATGTGTCTGATGGACATCCAGGCTGCAGGCATCATGGTGCTGTCTAGAGAGATGAGCCAGGT | |
| | GCCCAGAGCCCATGGGCCAATGCTGCCCTTTCTTGAGCATGCCAAACAAAGCGGTTGGTGTGTTAGAGGC | |
| | ACAGTCTCCTCCACTCTAAGTAAAAATCAGCATGAGTCCTAGCCCACATTTCCCTAGTGAGTACACCAAA | |
| | GATATCTATGAACTGGCAGTCATCAGTGACTTCCTAAGGTTCCGGAAATGCATCTCTTACTCAGGAGTAA | |
| | GCAATGATGTGCCTGCGGCTTTACGAGTTCTCACAGAATGACTTTCTGGACCCAAATGTTTTTTCTGCTT | |
| | CAGGACTGTGAAGGCCTTATTGTTCGCTCTGCCACCAAGGTGACCGCTGATGTCATCAACGCAGCTGAGA | |
| | AACTCCAGGTGGTGGGCAGGGCTGGCACAGGTGTGGACAATGTGGATCTGGAGGCCGCAACAAGGAAGGG | |
| | CATCTTGGTTATGAACACCCCCAATGGGAACAGCCTCAGTGCCGCAGAACTCACTTGTGGAATGATCATG | |
| | TGCCTGGCCAGGCAGATTCCCCAGGCGACGGCTTCGATGAAGGACGGCAAATGGGAGCGGAAGAAGTTCA | |
| | TGGGAACAGAGCTGAATGGAAAGACCCTGGGAATTCTTGGCCTGGGCAGGATTGGGAGAGAGGTAGCTAC | |
| | CCGGATGCAGTCCTTTGGGATGAAGACTATAGGGTATGACCCCATCATTTCCCCAGAGGTCTCGGCCTCC | |
| | TTTGGTGTTCAGCAGCTGCCCCTGGAGGAGATCTGGCCTCTCTGTGATTTCATCACTGTGCACACTCCTC | |
| | TCCTGCCCTCCACGACAGGCTTGCTGAATGACAACACCTTTGCCCAGTGCAAGAAGGGGGTGCGTGTGGT | |
| | GAACTGTGCCCGTGGAGGGATCGTGGACGAAGGCGCCCTGCTCCGGGCCCTGCAGTCTGGCCAGTGTGCC | |
| | GGGGCTGCACTGGACGTGTTTACGGAAGAGCCGCCACGGGACCGGGCCTTGGTGGACCATGAGAATGTCA | |
| | TCAGCTGTCCCCACCTGGGTGCCAGCACCAAGGAGGCTCAGAGCCGCTGTGGGGAGGAAATTGCTGTTCA | |
| | GTTCGTGGACATGGTGAAGGGGAAATCTCTCACGGGGGTTGTGAATGCCCAGGCCCTTACCAGTGCCTTC | |
| | TCTCCACACACCAAGCCTTGGATTGGTCTGGCAGAAGCTCTGGGGACACTGATGCGAGCCTGGGCTGGGT | |
| | CCCCCAAAGGGACCATCCAGGTGATAACACAGGGAACATCCCTGAAGAATGCTGGGAACTGCCTAAGCCC | |
| | CGCAGTCATTGTCGGCCTCCTGAAAGAGGCTTCCAAGCAGGCGGATGTGAACTTGGTGAACGCTAAGCTG | |
| | CTGGTGAAAGAGGCTGGCCTCAATGTCACCACCTCCCACAGCCCTGCTGCACCAGGGGGGCAAGGCTTCG | |
| | GGGAATGCCTCCTGGCCGTGGCCCTGGCAGGCGCCCCTTACCAGGCTGTGGGCTTGGTCCAAGGCACTAC | |
| | ACCTGTACTGCAGGGGCTCAATGGAGCTGTCTTCAGGCCAGAAGTGCCTCTCCGCAGGGACCTGCCCCTG | |
| | CTCCTATTCCGGACTCAGACCTCTGACCCTGCAATGCTGCCTACCATGATTGGCCTCCTGGCAGAGGCAG | |
| | GCGTGCGGCTGCTGTCCTACCAGACTTCACTGGTGTCAGATGGGGAGACCTGGCACGTCATGGGCATCTC | |
| | CTCCTTGCTGCCCAGCCTGGAAGCGTGGAAGCAGCATGTGACTGAAGCCTTCCAGTTCCACTTCTAACCT | |
| | TGGAGCTCACTGGTCCCTGCCTCTGGGGCTTTTCTGAAGAAACCCACCCACTGTGATCAATAGGGAGAGA | |
| | AAATCCACATTCTTGGGCTGAACGCGAGCCTCTGACACTGCTTACACTGCACTCTGACCCTGTAGTACAG | |
| | CAATAACCGTCTAATAAAGAGCCTACCCCC | |
| PTTG1 | CAAACAAAAACAGCCAAGCTTTTCTGCCAAAAAGATGACTGAGAAGACTGTTAAAGCAAAAAGCTCTGTT | 256 |
| BE904476 | CCTGCCTCAGATGATGCCTATCCAGAAATAGAAAAATTCTTTCCCTTCAATCCTCTAGACTTTGAGAGTT | |
| | TTGACCTGCCTGAAGAGCACCAGATTGCGCACCTCCCCTTGAGTGGAGTGCCTCTCATGATCCTTGACGA | |
| | GGAGAGAGAGCTTGAAAAGCTGTTTCAGCTGGGCCCCCCTTCACCTGTGAAGATGCCCTCTCCACCATGG | |
| | GAATCCAATCTGTTGCAGTCTCCTTCAAGCATTCTGTCGACCCTGGATGTTGAATTGCCACCTGTTTGCT | |
| | GTGACATAGATATTTAAATTTCTTAGTGCTTCAGAGTCTGTGTGTATTTGTATTAATAAAGCATTCTTTA | |
| | ACAGAAAAAAAAAAAAAAAAAAAAAAAAAAAAAAAAAAAAAAAAAAAAAAAGGGGGGGGAGACACAAAAA | |
| | GAATTCCCCAAGAGGGGGCCACAAGATAATCAGAGGATATCACACAAGATCTCTCGGCGCACCAACGACG | |
| | GGGGCCCCAAATAAGGGAGAGACCCAGAATCACAACAGCCAAGACACGGTGGACACGACGGAAACAAACA | |
| | CACAGCCCAGACACGGGGGCAAACACGCGCGCACACCGCGGACACCATGGGACAAAGCAGACACCACCCA | |
| | CAAAACAACACCGCGGAGGGGGAAGAACAACAAAACAAGTGCGCAAACAGAACACAACCACAGAAAGAGA | |
| | AAAATTAAAACGGCCCCCAAGACGGCGACAACACAACAAAACAACCACTACAGAGCGCTCAACAGCCGAG | |
| | TAAAAACACAACAACGGACAACTAACACACAAAGGAATGAAACAAAGCGGGGCCACACACCGACACCGGA | |
| | AATCCGGCGAACAACTCACACCGAGCGAGGGTCCCAGACAACAAATACACAGACAACGAAACCGAGAAAC | |
| | AAGACCAGCAAGACGAGCAGGCAAAAGACAAACAAGACAGAGGAGACGACGACGAACGCAAAGGACAAGA | |
| | GGACACAACGACGCGAGGAGCGAGAGCGAGAGGAAGAGACAACAAAAAGACACAAAAGAACAACAAGCAA | |
| | GCAGCGAAGAACGACACACAACCACACGAGACAGCAGGAGCAGAGGCGGAGAAAACACAACGAGCAAGCC | |
| | AAGACCAAGAGAGGAGAACAAAATAAAAAAATACGAGAGCAGGCGGACGAGAGCACGAGACGAACAGACA | |
| | AACGGGAATCAGAAGCATAACGATCCGCGACGCGAACAACN | |
| RRM2 | GTGCACCCTGTCCCAGCCGTCCTGTCCTGGCTGCTCGCTCTGCTTCGCTGCGCCTCCACTATGCTCTCCC | 257 |
| AK123010 | TCCGTGTCCCGCTCGCGCCCATCACGGACCCGCAGCAGCTGCAGCTCTCGCCGCTGAAGGGGCTCAGCTT | |
| | GGTCGACAAGGAGAACACGCCGCCGGCCCTGAGCGGGACCCGCGTCCTGGCCAGCAAGACCGCGAGGAGG | |
| | ATCTTCCAGGAGAAAACCCCCGCCGCTTTGTCATCTTCCCCATCGAGTACCATGATATCTGGCAGATGTA | |
| | TAAGAAGGCAGAGGCTTCCTTTTGGACCGCCGAGGAGGTGGACCTCTCCAAGGACATTCAGCACTGGGAA | |
| | TCCCTGAAACCCGAGGAGAGATATTTTATATCCCATGTTCTGGCTTTCTTTGCAGCAAGCGATGGCATAG | |
| | TAAATGAAAACTTGGTGGAGCGATTTAGCCAAGAAGTTCAGATTACAGAAGCCCGCTGTTTCTATGGCTT | |
| | CCAAATTGCCATGGAAAACATACATTCTGAAATGTATAGTCTTCTTATTGACACTTACATAAAAGATCCC | |
| | AAAGAAAGGGAATTTCTCTTCAATGCCATTGAAACGATGCCTTGTGTCAAGAAGAAGGCAGACTGGGCCT | |
| | TGCGCTGGATTGGGGACAAAGAGGCTACCTATGGTGAACGTGTTGTAGCCTTTGCTGCAGTGGAAGGCAT | |
| | TTTCTTTTCCGGTTCTTTTGCGTCGATATTCTGGCTCAAGAAACGAGGACTGATGCCTGGCCTCACATTT | |
| | TCTAATGAACTTATTAGCAGAGATGAGGGTTTACACTGTGATTTTGCTTGCCTGATGTTCAAACACCTGG | |
| | TACACAAACCATCGGAGGAGAGAGTAAGAGAAATAATTATCAATGCTGTTCGGATAGAACAGGAGTTCCT | |
| | CACTGAGGCCTTGCCTGTGAAGCTCATTGGGATGAATTGCACTCTAATGAAGCAATACATTGAGTTTGTG | |
| | GCAGACAGACTTATGCTGGAACTGGGTTTTAGCAAGGTTTTCAGAGTAGAGAACCCATTTGACTTTATGG | |
| | AGAATATTTCACTGGAAGGAAAGACTAACTTCTTTGAGAAGAGAGTAGGCGAGTATCAGAGGATGGGAGT | |
| | GATGTCAAGTCCAACAGAGAATTCTTTTACCTTGGATGCTGACTTCTAAATGAACTGAAGATGTGCCCTT | |
| | ACTTGGCTGATTTTTTTTTTTCCATCTCATAAGAAAAATCAGCTGAAGTGTTACCAACTAGCCACACCAT | |
| | GAATTGTCCGTAATGTTCATTAACAGCATCTTTAAAACTGTGTAGCTACCTCACAACCAGTCCTGTCTGT | |
| | TTATAGTGCTGGTAGTATCACCTTTTGCCAGAAGGCCTGGCTGGCTGTGACTTACCATAGCAGTGACAAT | |
| | GGCAGTCTTGGCTTTAAAGTGAGGGGTGACCCTTTAGTGAGCTTAGCACAGCGGGATTAAACAGTCCTTT | |
| | AACCAGCACAGCCAGTTAAAAGATGCAGCCTCACTGCTTCAACGCAGATTTTAATGTTTACTTAAATATA | |
| | AACCTGGCACTTTACAAACAAATAAACATTGTTTGTACTCACAAGGCGATAATAGCTTGATTTATTTGGT | |
| | TTCTACACCAAATACATTCTCCTGACCACTAATGGGAGCCAATTCACAATTCACTAAGTGACTAAAGTAA | |
| | GTTAAACTTGTGTAGACTAAGCATGTAATTTTTAAGTTTTATTTTAATGAATTAAAATATTTGTTAACCA | |
| | ACTTTAAAGTCAGTCCTGTGTATACCTAGATATTAGTCAGTTGGTGCCAGATAGAAGACAGGTTGTGTTT | |
| | TTATCCTGTGGCTTGTGTAGTGTCCTGGGATTCTCTGCCCCCTCTGAGTAGAGTGTTGTGGGATAAAGGA | |
| | ATCTCTCAGGGCAAGGAGCTTCTTAAGTTAAATCACTAGAAATTTAGGGGTGATCTGGGCCTTCATATGT | |
| | GTGAGAAGCCGTTTCATTTTATTTCTCACTGTATTTTCCTCAACGTCTGGTTGATGAGAAAAAATTCTTG | |
| | AAGAGTTTTCATATGTGGGAGCTAAGGTAGTATTGTAAAATTTCAAGTCATCCTTAAACAAAATGATCCA | |
| | CCTAAGATCTTGCCCCTGTTAAGTGGTGAAATCAACTAGAGGTGGTTCCTACAAGTTGTTCATTCTAGTT | |
| | TTGTTTGGTGTAAGTAGGTTGTGTGAGTTAATTCATTTATATTTACTATGTCTGTTAAATCAGAAATTTT | |
| | TTATTATCTATGTTCTTCTAGATTTTACCTGTAGTTCATACTTCAGTCACCCAGTGTCTTATTCTGGCAT | |
| | TGTCTAAATCTGAGCATTGTCTAGGGGGATCTTAAACTTTAGTAGGAAACCATGAGCTGTTAATACAGTT | |
| | TCCATTCAAATATTAATTTCAGAATGAAACATAATTTTTTTTTTTTTTTTTTGAGATGGAGTCTCGCTCT | |
| | GTTGCCCAGGCTGGAGTGCAGTGGCGCGATTTTGGCTCACTGTAACCTCCATCTCCTGGGTTCAAGCAAT | |
| | TCTCCTGTCTCAGCCTCCCTAGTAGCTGGGACTGCAGGTATGTGCTACCACACCTGGCTAATTTTTGTAT | |
| | TTTTAGTAGAGATGGAGTTTCACCATATTGGTCAGGCTGGTCTTGAACTCCTGACCTCAGGTGATCCACC | |
| | CACCTCGGCCTCCCAAAGTGCTGGGATTGCAGGCGTGATAAACAAATATTCTTAATAGGGCTACTTTGAA | |
| | TTAATCTGCCTTTATGTTTGGGAGAAGAAAGCTGAGACATTGCATGAAAGATGATGAGAGATAAATGTTG | |
| | ATCTTTTGGCCCCATTTGTTAATTGTATTCAGTATTTGAACGTCGTCCTGTTTATTGTTAGTTTTCTTCA | |
| | TCATTTATTGTATAGACAATTTTTAAATCTCTGTAATATGATACATTTTCCTATCTTTTAAGTTATTGTT | |
| | ACCTAAAGTTAATCCAGATTATATGGTCCTTATATGTGTACAACATTAAAATGAAAGGCTTTGTCTTGCA | |
| | TTGTGAGGTACAGGCGGAAGTTGGAATCAGGTTTTAGGATTCTGTCTCTCATTAGCTGAATAATGTGAGG | |
| | ATTAACTTCTGCCAGCTCAGACCATTTCCTAATCAGTTGAAAGGGAAACAAGTATTTCAGTCTCAAAATT | |
| | GAATAATGCACAAGTCTTAAGTGATTAAAATAAAACTGTTCTTATGTCAGTTT | |
| SFRP1 | AGCGGGGGCACTCCAGCCCTGCAGCCTCCGGAGTCAGTGCCGCGCGCCCGCCGCCCCGCGCCTTCCTGCT | 258 |
| BC036503 | CGCCGCACCTCCGGGAGCCGGGGCGCACCCAGCCCGCAGCGCCGCCTCCCCGCCCGCGCCGCCTCCGACC | |
| | GCAGGCCGAGGGCCGCCACTGGCCGGGGGGACCGGGCAGCAGCTTGCGGCCGCGGAGCCGGGCAACGCTG | |
| | GGGACTGCGCCTTTTGTCCCCGGAGGTCCCTGGAAGTTTGCGGCAGGACGCGCGCGGGGAGGCGGCGGAG | |
| | GCAGCCCCGACGTCGCGGAGAACAGGGCGCAGAGCCGGCATGGGCATCGGGCGCAGCGAGGGGGGCCGCC | |
| | GCGGGGCAGCCCTGGGCGTGCTGCTGGCGCTGGGCGCGGCGCTTCTGGCCGTGGGCTCGGCCAGCGAGTA | |
| | CGACTACGTGAGCTTCCAGTCGGACATCGGCCCGTACCAGAGCGGGCGCTTCTACACCAAGCCACCTCAG | |
| | TGCGTGGACATCCCCGCGGACCTGCGGCTGTGCCACAACGTGGGCTACAAGAAGATGGTGCTGCCCAACC | |
| | TGCTGGAGCACGAGACCATGGCGGAGGTGAAGCAGCAGGCCAGCAGCTGGGTGCCCCTGCTCAACAAGAA | |
| | CTGCCACGCCGGCACCCAGGTCTTCCTCTGCTCGCTCTTCGCGCCCGTCTGCCTGGACCGGCCCATCTAC | |
| | CCGTGTCGCTGGCTCTGCGAGGCCGTGCGCGACTCGTGCGAGCCGGTCATGCAGTTCTTCGGCTTCTACT | |
| | GGCCCGAGATGCTTAAGTGTGACAAGTTCCCCGAGGGGGACGTCTGCATCGCCATGACGCCGCCCAATGC | |
| | CACCGAAGCCTCCAAGCCCCAAGGCACAACGGTGTGTCCTCCCTGTGACAACGAGTTGAAATCTGAGGCC | |
| | ATCATTGAACATCTCTGTGCCAGCGAGTTTGCACTGAGGATGAAAATAAAAGAAGTGAAAAAAGAAAATG | |
| | GCGACAAGAAGATTGTCCCCAAGAAGAAGAAGCCCCTGAAGTTGGGGCCCATCAAGAAGAAGGACCTGAA | |
| | GAAGCTTGTGCTGTACCTGAAGAATGGGGCTGACTGTCCCTGCCACCAGCTGGACAACCTCAGCCACCAC | |
| | TTCCTCATCATGGGCCGCAAGGTGAAGAGCCAGTACTTGCTGACGGCCATCCACAAGTGGGACAAGAAAA | |
| | ACAAGGAGTTCAAAAACTTCATGAAGAAAATGAAAAACCATGAGTGCCCCACCTTTCAGTCCGTGTTTAA | |
| | GTGATTCTCCCGGGGGCAGGGTGGGGAGGGAGCCTCGGGTGGGGTGGGAGCGGGGGGGACAGTGCCCCGG | |
| | GAACCCGGTGGGTCACACACACGCACTGCGCCTGTCAGTAGTGGACATTTAATCCAGTCGGCTTGTTCTT | |
| | GCAGCATTCCCGCTCCCTTCCCTCCATAGCCACGCTCCAAACCCCAGGGTAGCCATGGCCGGGTAAAGCA | |
| | AGGGCCATTTAGATTAGGAAGGTTTTTAAGATCCGCAATGTGGAGCAGCAGCCACTGCACAGGAGGAGGT | |
| | GACAAACCATTTCCAACAGCAACACAGCCACTAAAACACAAAAAGGGGGATTGGGCGGAAAGTGAGAGCC | |
| | AGCAGCAAAAACTACATTTTGCAACTTGTTGGTGTGGATCTATTGGCTGATCTATGCCTTTCAACTAGAA | |
| | AATTCTAATGATTGGCAAGTCACGTTGTTTTCAGGTCCAGAGTAGTTTCTTTCTGTCTGCTTTAAATGGA | |
| | AACAGACTCATACCACACTTACAATTAAGGTCAAGCCCAGAAAGTGATAAGTGCAGGGAGGAAAAGTGCA | |
| | AGTCCATTATGTAATAGTGACAGCAAAGGGACCAGGGGAGAGGCATTGCCTTCTCTGCCCACAGTCTTTC | |
| | CGTGTGATTGTCTTTGAATCTGAATCAGCCAGTCTCAGATGCCCCAAAGTTTCGGTTCCTATGAGCCCGG | |
| | GGCATGATCTGATCCCCAAGACATGTGGAGGGGCAGCCTGTGCCTGCCTTTGTGTCAGAAAAAGGAAACC | |
| | ACAGTGAGCCTGAGAGAGACGGCGATTTTCGGGCTGAGAAGGCAGTAGTTTTCAAAACACATAGTTAAAA | |
| | AAGAAACAAATGAAAAAAATTTTAGAACAGTCCAGCAAATTGCTAGTCAGGGTGAATTGTGAAATTGGGT | |
| | GAAGAGCTTACGATTCTAATCTCATGTTTTTTCCTTTTCACATTTTTAAAAGAACAATGACAAACACCCA | |
| | CTTATTTTTCAAGGTTTTAAAACAGTCTACATTGAGCATTTGAAAGGTGTGCTAGAACAAGGTCTCCTGA | |
| | TCCGTCCGAGGCTGCTTCCCAGAGGAGCAGCTCTCCCCAGGCATTTGCCAAGGGAGGCGGATTTCCCTGG | |
| | TAGTGTAGCTGTGTGGCTTTCCTTCCTGAAGAGTCCGTGGTTGCCCTAGAACCTAACACCCCCTAGCAAA | |
| | ACTCACAGAGCTTTCCGTTTTTTTCTTTCCTGTAAAGAAACATTTCCTTTGAACTTGATTGCCTATGGAT | |
| | CAAAGAAATTCAGAACAGCCTGCCTGTCCCCCCGCACTTTTTACATATATTTGTTTCATTTCTGCAGATG | |
| | GAAAGTTGACATGGGTGGGGTGTCCCCATCCAGCGAGAGAGTTTAAAAAGCAAAACATCTCTGCAGTTTT | |
| | TCCCAAGTGCCCTGAGATACTTCCCAAAGCCCTTATGTTTAATCAGCGATGTATATAAGCCAGTTCACTT | |
| | AGACAACTTTACCCTTCTTGTCCAATGTACAGGAAGTAGTTCTAAAAAAAATGCATATTAATTTCTTCCC | |
| | CCAAAGCCGGATTCTTAATTCTCTGCAACACTTTGAGGACATTTATGATTGTCCCTCTGGGCCAATGCTT | |
| | ATACCCAGTGAGGATGCTGCAGTGAGGCTGTAAAGTGGCCCCCTGCGGCCCTAGCCTGACCCGGAGGAAA | |
| | GGATGGTAGATTCTGTTAACTCTTGAAGACTCCAGTATGAAAATCAGCATGCCCGCCTAGTTACCTACCG | |
| | GAGAGTTATCCTGATAAATTAACCTCTCACAGTTAGTGATCCTGTCCTTTTAACACCTTTTTTGTGGGGT | |
| | TCTCTCTGACCTTTCATCGTAAAGTGCTGGGGACCTTAAGTGATTTGCCTGTAATTTTGGATGATTAAAA | |
| | AATGTGTATATATATTAGCTAATTAGAAATATTCTACTTCTCTGTTGTCAAACTGAAATTCAGAGCAAGT | |
| | TCCTGAGTGCGTGGATCTGGGTCTTAGTTCTGGTTGATTCACTCAAGAGTTCAGTGCTCATACGTATCTG | |
| | CTCATTTTGACAAAGTGCCTCATGCAACCGGGCCCTCTCTCTGCGGCAGAGTCCTTAGTGGAGGGGTTTA | |
| | CCTGGAACATTAGTAGTTACCACAGAATACGGAAGAGCAGGTGACTGTGCTGTGCAGCTCTCTAAATGGG | |
| | AATTCTCAGGTAGGAAGCAACAGCTTCAGAAAGAGCTCAAAATAAATTGGAAATGTGAATCGCAGCTGTG | |
| | GGTTTTACCACCGTCTGTCTCAGAGTCCCAGGACCTTGAGTGTCATTAGTTACTTTATTGAAGGTTTTAG | |
| | ACCCATAGCAGCTTTGTCTCTGTCACATCAGCAATTTCAGAACCAAAAGGGAGGCTCTCTGTAGGCACAG | |
| | AGCTGCACTATCACGAGCCTTTGTTTTTCTCCACAAAGTATCTAACAAAACCAATGTGCAGACTGATTGG | |
| | CCTGGTCATTGGTCTCCGAGAGAGGAGGTTTGCCTGTGATTTCCTAATTATCGCTAGGGCCAAGGTGGGA | |
| | TTTGTAAAGCTTTACAATAATCATTCTGGATAGAGTCCTGGGAGGTCCTTGGCAGAACTCAGTTAAATCT | |
| | TTGAAGAATATTTGTAGTTATCTTAGAAGATAGCATGGGAGGTGAGGATTCCAAAAACATTTTATTTTTA | |
| | AAATATCCTGTGTAACACTTGGCTCTTGGTACCTGTGGGTTAGCATCAAGTTCTCCCCAGGGTAGAATTC | |
| | AATCAGAGCTCCAGTTTGCATTTGGATGTGTAAATTACAGTAATCCCATTTCCCAAACCTAAAATCTGTT | |
| | TTTCTCATCAGACTCTGAGTAACTGGTTGCTGTGTCATAACTTCATAGATGCAGGAGGCTCAGGTGATCT | |
| | GTTTGAGCAGAGCACCCTAGGCAGCCTGCAGGGAATAACATACTGGCCGTTCTGACCTGTTGCCAGCAGA | |
| | TACACAGGACATGGATGAAATTCCCGTTTCCTCTAGTTTCTTCCTGTAGTACTCCTCTTTTAGATCCTAA | |
| | GTCTCTTACAAAAGCTTTGAATACTGTGAAAATGTTTTACATTCCATTTCATTTGTGTTGTTTTTTTAAC | |
| | TGCATTTTACCAGATGTTTTGATGTTATCGCTTATGTTAATAGTAATTCCCGTACGTGTTCATTTTATTT | |
| | TCATGCTTTTTCAGCCATGTATCAATATTCACTTGACTAAAATCACTCAATTAATCAAAAAAAAAAAAAA | |
| | AA | |
| SLC39A6 | AGTCCTGGGCGAAGGGGGCGGTGGTTCCCCGCGGCGCTGCGCGCGGCGGTAATTAGTGATTGTCTTCCAG | 259 |
| NM_012319 | CTTCGCGAAGGCTAGGGGCGCGGCTGCCGGGTGGCTGCGCGGCGCTGCCCCCGGACCGAGGGGCAGCCAA | |
| | CCCAATGAAACCACCGCGTGTTCGCGCCTGGTAGAGATTTCTCGAAGACACCAGTGGGCCCGTTCCGAGC | |
| | CCTCTGGACCGCCCGTGTGGAACCAAACCTGCGCGCGTGGCCGGGCCGTGGGACAACGAGGCCGCGGAGA | |
| | CGAAGGCGCAATGGCGAGGAAGTTATCTGTAATCTTGATCCTGACCTTTGCCCTCTCTGTCACAAATCCC | |
| | CTTCATGAACTAAAAGCAGCTGCTTTCCCCCAGACCACTGAGAAAATTAGTCCGAATTGGGAATCTGGCA | |
| | TTAATGTTGACTTGGCAATTTCCACACGGCAATATCATCTACAACAGCTTTTCTACCGCTATGGAGAAAA | |
| | TAATTCTTTGTCAGTTGAAGGGTTCAGAAAATTACTTCAAAATATAGGCATAGATAAGATTAAAAGAATC | |
| | CATATACACCATGACCACGACCATCACTCAGACCACGAGCATCACTCAGACCATGAGCGTCACTCAGACC | |
| | ATGAGCATCACTCAGACCACGAGCATCACTCTGACCATGATCATCACTCTCACCATAATCATGCTGCTTC | |
| | TGGTAAAAATAAGCGAAAAGCTCTTTGCCCAGACCATGACTCAGATAGTTCAGGTAAAGATCCTAGAAAC | |
| | AGCCAGGGGAAAGGAGCTCACCGACCAGAACATGCCAGTGGTAGAAGGAATGTCAAGGACAGTGTTAGTG | |
| | CTAGTGAAGTGACCTCAACTGTGTACAACACTGTCTCTGAAGGAACTCACTTTCTAGAGACAATAGAGAC | |
| | TCCAAGACCTGGAAAACTCTTCCCCAAAGATGTAAGCAGCTCCACTCCACCCAGTGTCACATCAAAGAGC | |
| | CGGGTGAGCCGGCTGGCTGGTAGGAAAACAAATGAATCTGTGAGTGAGCCCCGAAAAGGCTTTATGTATT | |
| | CCAGAAACACAAATGAAAATCCTCAGGAGTGTTTCAATGCATCAAAGCTACTGACATCTCATGGCATGGG | |
| | CATCCAGGTTCCGCTGAATGCAACAGAGTTCAACTATCTCTGTCCAGCCATCATCAACCAAATTGATGCT | |
| | AGATCTTGTCTGATTCATACAAGTGAAAAGAAGGCTGAAATCCCTCCAAAGACCTATTCATTACAAATAG | |
| | CCTGGGTTGGTGGTTTTATAGCCATTTCCATCATCAGTTTCCTGTCTCTGCTGGGGGTTATCTTAGTGCC | |
| | TCTCATGAATCGGGTGTTTTTCAAATTTCTCCTGAGTTTCCTTGTGGCACTGGCCGTTGGGACTTTGAGT | |
| | GGTGATGCTTTTTTACACCTTCTTCCACATTCTCATGCAAGTCACCACCATAGTCATAGCCATGAAGAAC | |
| | CAGCAATGGAAATGAAAAGAGGACCACTTTTCAGTCATCTGTCTTCTCAAAACATAGAAGAAAGTGCCTA | |
| | TTTTGATTCCACGTGGAAGGGTCTAACAGCTCTAGGAGGCCTGTATTTCATGTTTCTTGTTGAACATGTC | |
| | CTCACATTGATCAAACAATTTAAAGATAAGAAGAAAAAGAATCAGAAGAAACCTGAAAATGATGATGATG | |
| | TGGAGATTAAGAAGCAGTTGTCCAAGTATGAATCTCAACTTTCAACAAATGAGGAGAAAGTAGATACAGA | |
| | TGATCGAACTGAAGGCTATTTACGAGCAGACTCACAAGAGCCCTCCCACTTTGATTCTCAGCAGCCTGCA | |
| | GTCTTGGAAGAAGAAGAGGTCATGATAGCTCATGCTCATCCACAGGAAGTCTACAATGAATATGTACCCA | |
| | GAGGGTGCAAGAATAAATGCCATTCACATTTCCACGATACACTCGGCCAGTCAGACGATCTCATTCACCA | |
| | CCATCATGACTACCATCATATTCTCCATCATCACCACCACCAAAACCACCATCCTCACAGTCACAGCCAG | |
| | CGCTACTCTCGGGAGGAGCTGAAAGATGCCGGCGTCGCCACTCTGGCCTGGATGGTGATAATGGGTGATG | |
| | GCCTGCACAATTTCAGCGATGGCCTAGCAATTGGTGCTGCTTTTACTGAAGGCTTATCAAGTGGTTTAAG | |
| | TACTTCTGTTGCTGTGTTCTGTCATGAGTTGCCTCATGAATTAGGTGACTTTGCTGTTCTACTAAAGGCT | |
| | GGCATGACCGTTAAGCAGGCTGTCCTTTATAATGCATTGTCAGCCATGCTGGCGTATCTTGGAATGGCAA | |
| | CAGGAATTTTCATTGGTCATTATGCTGAAAATGTTTCTATGTGGATATTTGCACTTACTGCTGGCTTATT | |
| | CATGTATGTTGCTCTGGTTGATATGGTACCTGAAATGCTGCACAATGATGCTAGTGACCATGGATGTAGC | |
| | CGCTGGGGGTATTTCTTTTTACAGAATGCTGGGATGCTTTTGGGTTTTGGAATTATGTTACTTATTTCCA | |
| | TATTTGAACATAAAATCGTGTTTCGTATAAATTTCTAGTTAAGGTTTAAATGCTAGAGTAGCTTAAAAAG | |
| | TTGTCATAGTTTCAGTAGGTCATAGGGAGATGAGTTTGTATGCTGTACTATGCAGCGTTTAAAGTTAGTG | |
| | GGTTTTGTGATTTTTGTATTGAATATTGCTGTCTGTTACAAAGTCAGTTAAAGGTACGTTTTAATATTTA | |
| | AGTTATTCTATCTTGGAGATAAAATCTGTATGTGCAATTCACCGGTATTACCAGTTTATTATGTAAACAA | |
| | GAGATTTGGCATGACATGTTCTGTATGTTTCAGGGAAAAATGTCTTTAATGCTTTTTCAAGAACTAACAC | |
| | AGTTATTCCTATACTGGATTTTAGGTCTCTGAAGAACTGCTGGTGTTTAGGAATAAGAATGTGCATGAAG | |
| | CCTAAAATACCAAGAAAGCTTATACTGAATTTAAGCAAAGAAATAAAGGAGAAAAGAGAAGAATCTGAGA | |
| | ATTGGGGAGGCATAGATTCTTATAAAAATCACAAAATTTGTTGTAAATTAGAGGGGAGAAATTTAGAATT | |
| | AAGTATAAAAAGGCAGAATTAGTATAGAGTACATTCATTAAACATTTTTGTCAGGATTATTTCCCGTAAA | |
| | AACGTAGTGAGCACTTTTCATATACTAATTTAGTTGTACATTTAACTTTGTATAATACAGAAATCTAAAT | |
| | ATATTTAATGAATTCAAGCAATATATCACTTGACCAAGAAATTGGAATTTCAAAATGTTCGTGCGGGTAT | |
| | ATACCAGATGAGTACAGTGAGTAGTTTTATGTATCACCAGACTGGGTTATTGCCAAGTTATATATCACCA | |
| | AAAGCTGTATGACTGGATGTTCTGGTTACCTGGTTTACAAAATTATCAGAGTAGTAAAACTTTGATATAT | |
| | ATGAGGATATTAAAACTACACTAAGTATCATTTGATTCGATTCAGAAAGTACTTTGATATCTCTCAGTGC | |
| | TTCAGTGCTATCATTGTGAGCAATTGTCTTTTATATACGGTACTGTAGCCATACTAGGCCTGTCTGTGGC | |
| | ATTCTCTAGATGTTTCTTTTTTACACAATAAATTCCTTATATCAGCTTGAAAAAAAAAAAAAAAAAA | |
| TMEM45B | AACGCACTTGGCGCGCGGCGCGGGCTGCAGACGGCTGCGAGGCGCTGGGCACAGGTGTCCTGATGGCAAA | 260 |
| AK098106 | TTTCAAGGGCCACGCGCTTCCAGGGAGTTTCTTCCTGATCATTGGGCTGTGTTGGTCAGTGAAGTACCCG | |
| | CTGAAGTACTTTAGCCACACGCGGAAGAACAGCCCACTACATTACTATCAGCGTCTCGAGATCGTCGAAG | |
| | CCGCAATTAGGACTTTGTTTTCCGTCACTGGGATCCTGGCAGAGCAGTTTGTTCCGGATGGGCCCCACCT | |
| | GCACCTCTACCATGAGAACCACTGGATAAAGTTAATGAATTGGCAGCACAGCACCATGTACCTATTCTTT | |
| | GCAGTCTCAGGAATTGTTGACATGCTCACCTATCTGGTCAGCCACGTTCCCTTGGGGGTGGACAGACTGG | |
| | TTATGGCTGTGGCAGTATTCATGGAAGGTTTCCTCTTCTACTACCACGTCCACAACCGGCCTCCGCTGGA | |
| | CCAGCACATCCACTCACTCCTGCTGTATGCTCTGTTCGGAGGGTGTGTTAGTATCTCCCTAGAGGTGATC | |
| | TTCCGGGACCACATTGTGCTGGAACTTTTCCGAACCAGTCTCATCATTCTTCAGGGAACCTGGTTCTGGC | |
| | AGATTGGGTTTGTGCTGTTCCCACCTTTTGGAACACCCGAATGGGACCAGAAGGATGATGCCAACCTCAT | |
| | GTTCATCACCATGTGCTTCTGCTGGCACTACCTGGCTGCCCTCAGCATTGTGGCCGTCAACTATTCTCTT | |
| | GTTTACTGCCTTTTGACTCGGATGAAGAGACACGGAAGGGGAGAAATCATTGGAATTCAGAAGCTGAATT | |
| | CAGATGACACTTACCAGACCGCCCTCTTGAGTGGCTCAGATGAGGAATGAGCCGAGATGCGGAGGGCGCA | |
| | GATGTCCCACTGCACAGCTGGAATGAATGGAGTTCATCCCCTCCACCTGAATGCCTGCTGTGGTCTGATC | |
| | TTAAGGGTCTATATATTTGCACCTCCTCATTCAACACAGGGCTGGAGGTTCTACAACAGGAAATCAGGCC | |
| | TACAGCATCCTGTGTATCTTGCAGTTGGGATTTTTAAACATACTATAAAGTCTGTGTTGGTATAGTACCC | |
| | TTCATAAGGAAAAATGAAGTAATGCCTATAAGTAGCAGGCCTTTGTGCCTCAGTGTCAAGAGAAATCAAG | |
| | AGATGCTAAAAGCTTTACAATGGAAGTGGCCTCATGGATGAATCCGGGGTATGAGCCCAGGAGAACGTGC | |
| | TGCTTTTGGTAACTTATCCCTTTTTCTCTTAAGAAAGCAGGTACTTTCTTATTAGAAATATGTTAGAATG | |
| | TGTAAGCAAACGACAGTGCCTTTAGAATTACAATTCTAACTTACATATTTTTTGAAAGTAAAATAATTCA | |
| | CAAGCTTTGGTATTTTAAAATTATTGTTAAACATATCATAACTAATCATACCAGGGTACTGCAATACCAC | |
| | TGTTTATAAGTGACAAAATTAGGCCAAAGGTGATTTTTTTTTAAATCAGGAAGCTGGTTACTGGCTCTAC | |
| | TGAGAGTTGGAGCCCTGATGTTCTGATTCTTCAAAGTCACCCTAAAAGAAGATCTGACAGGAAAGCTGTA | |
| | TAATGAGATAGAAAAACGTCAGGTATGGAAGGCTTTCAGTTTTAATATGGCTGAAAGCAAAGGATAACGA | |
| | ATTCAGAATTAGTAATGTAAAATCTTGATACCCTAATCTTGCTTCTGGATCTGTTCTTTTTTTAAAAAAA | |
| | CTTCCTTCACCGCGCCTATAATCCTAGCACTTTGGGAGGCCGAGGCAGGCAGATCACGGGGTCAGGAGAT | |
| | CAAGACCATCCTGGCTAACATGGTGAAACCCCGTCTCTACTGAAAATACAAAAAATTAGCCGGGTGTGGT | |
| | GGCGGGCGCCTGTAGTTCCAGCTACTCGGGAGGCTGAGGCAAGAGAATGGCATGAACCCGGTAGGGGAGC | |
| | TTGCAGTGAGCCCAGATCATGCCACTGTACTCCAGCCTAGGTGACAGAGCAAGACTCTGTCTCAAAAACA | |
| | AGCAAACAGACTTCCTTCAACAAATATTTATTAAATATCCACTTTGCAACAGCACTGAAATGGCTGTAAG | |
| | GACTCCTGAGATATGTGTCCAGCAAGGAGTTTACAGTCAAACAGGAGAGACATGCCTGTAGTTACATCCA | |
| | GTGTGATGGGTGCTGAGAGGCAAGTACAAACCACGATG | |
| TYMS | TCCCGCCGCGCCACTTCGCCTGCCTCCGTCCCCCGCCCGCCGCGCCATGCCTGTGGCCGGCTCGGAGCTG | 261 |
| BQ056428 | CCGCGCCGGCCCTTGCCCCCCGCCGCACAGGAGCGGGACGCCGAGCCGCGTCCGCCGCACGGGGAGCTGC | |
| | AGTACCTGGGGCAGATCCAACACATCCTCCGCTGCGGCGTCAGGAAGGACGCCCGCCCGGGCACCGGTAC | |
| | CCTGCCGGTATTCGGCATGCAGGCGCGCTACAGCCTGAGAGATGAATTCCCTCTGCTGACAACCAAACGT | |
| | GTGTTCTGGAACGGTGCTTCGGAGGAGCTGCTGTGGCTTATCAAGGGATCCACAAACGCTATAGACCTGT | |
| | CTTCCCCGGCAGCGAAAATCTCGGGATGCCACTGGATCCCGACACTCTCTGGACACCCTGGGATTCTCCA | |
| | CCAGAGAAGAACGCGACTTGGGCCCAGTTTGTGGCTCTCAGCGGAGGCCTCCTGTGGCAGAATACATACA | |
| | TTTCCAATCAGATCACTTCCCGGACACGGACCNTGACCAGCCTGCCAAAAAGTGGATTTCCCCCCACCCC | |
| | AGAACCCANCCCCTGACGCACAGAAACCAACCCATTCGTTGTTGCCGCCTTGCGAACCCCAACCAGAATC | |
| | TCTCCCCCCTGGCCGGCGCGCCTGCCGCTGCCAATGCCCCTATGGCGGCCTCTTGGCCCGCACCTTCCAA | |
| | TTGGTCGCCCTGCGCAACCAGCGAGAAAACACTGGCCCGCCCGTCTCCCCCCCGCTCCGCCTACCCCACT | |
| | TAATGCGCCTCCGTGGCATGACGCACGCGTTTGGTGTCCGCCGCCGTCTCATGTCCGCGCGGTGTGGACC | |
| | CCCTTTTCTCTCGCGGCACATCCCCCCTATTCCCTTGCCCTTTGGGGGGCACCCCCTCTAGACCCGCGCT | |
| | TCTCTTCTCGTCCGGTGGGGGACATTGGTTTGCCTGCCGCGGCGGGGGCGNTAAAAATAAAAACAGCCTG | |
| | TTAGCCCGGCCCAGTACCCCCCCCCGGCCGGGGCCGCCTTNCGTTTGCATTTATACCCCAACCCATAAAG | |
| | CCGCGCCCCTTTAGCNCCNTAACTTTTGTGGTGTGGCCTCCCCCCTTTTTCCCGGGGAGCAGCAACGGAC | |
| | ATCTGTACACTAATGCTGGCCCCGACCTTTCCCAAAAACCCCCCGCCCGTGTCCCGTATAAATTTGGTGC | |
| | CAANCCTGACGNGTTCTCCCCCGCCCTCGCCCCGTTGGCCGCCCGTTTAAAGCCCCCCCGGTGGTTGCGC | |
| | CGCCCAACGAGTCCACCTATAGTTAANTCCACCAACACCCCCACCTTTTCCTCCCCGCCGCATCTTCCCC | |
| | ACGTACCCCCTTTTGTCGCGAGATGGCCACTCCCCCCCCCCTGTTTGTTTAAAACAACGAGAATGGTGCT | |
| | GCCAACGCTGGTCTTTTCCCCCCCCGGACCGCGACCGCCAGGGGGAATACGTACCATAAGCCCCCGCGCC | |
| | CNCCTTTTTTCCCCCCTCCCCGCCAATCAAGATCCGCCGTCCATTAGACGTATTATTTTTCCCGCGATAC | |
| | ACGAAAAAACAGGGCCGCCCATTTATAACTAAATTCCCGTCGCCGCCGCGCGGATATGTTTCCCAAAATA | |
| | CCACCCCCCCCCCCCCATTTTCTTTGCCCCCAACTCCTGCGCACCGGTGTTCACCAGCCTCGCGCCGC | |
| UBE2C | GGACGCGTGGGTCGACCCACGCGTCCGGACCCACGCGTCCGGTCGTGTTCTCCGAGTTCCTGTCTCTCTG | 262 |
| BC032677 | CCAACGCCGCCCGGATGGCTTCCCAAAACCGCGACCCAGCCGCCACTAGCGTCGCCGCCGCCCGTAAAGG | |
| | AGCTGAGCCGAGCGGGGGCGCCGCCCGGGGTCCGGTGGGCAAAAGGCTACAGCAGGAGCTGATGACCCTC | |
| | ATGGTGAGTGATTAAGTGCCCAGAACCCCAGCCTTCCATCCAATTTTCAGTAGCCTCCTTTTTTCCGTCA | |
| | GCTTTTTTGCTAGACATAGGGGTAATGTAATTTGCTCCCTCCTGGGAAAGAAGTTCATACACCCCACCTA | |
| | CACCATTTCTTCCAGCAGTCCCTCCTCCCAATTCCATCCCCCCACACGAAGTTATCTCGAACACTTCCCT | |
| | GAAGTCATACAAGACCCTCCCTATCCAGTGTGTCCCTACTTCCTAGCCCCAACCAAGCTTTACCCACACC | |
| | CAACTCCCCGCCCTTCTTGGTATTTCTAGCCTATGAATTTGGTTGCTTTATTTTGGATCAGAGTGATGAG | |
| | ATTAAGGGGAGGCTGGGCGCGGTAGCTCACACCTTATAATCCCAAAGTGCTGGGATTACAGGCGTGAGCC | |
| | ACCGCGCCCGGCCAGCAACTAATATTCTAATTGAACTAAAGCACAGGATGCCAATTTACAATCCTTAGAC | |
| | CAAAGAGTCACTGATGTCTCCACCAGATAAGAGGAAAGCATCAGGCTAGGCATAGTGGCTCACACCTGTA | |
| | ATCTCAGCACTTTGGGAGGCTGAGGCAGGCAGATCACATGAGCCCAGGAGTTTGAGACTGGCCTGGGCAA | |
| | CATGGTGAAACCCTGTCTCTAAAATAAAAACTAAACTAAAAAAACTTTTTAAAAAGGCAGTGGGGAGCAT | |
| | CAGAACCAGCTCAACAGTTTGTCTACTGTCCGGTCCCAGAGAAACTCAAGATTCTAGCAAGCCCCTTGTG | |
| | TGGGGCTTGGGTTGGGACATGAGGCTGCTGCTGGAGCTTACTCTGCAACTGTTTCTCCAAATGCCAGGTA | |
| | TATGAAGACCTGAGGTATAAGCTCTCGCTAGAGTTCCCCAGTGGCTACCCTTACAATGCGCCCACAGTGA | |
| | AGTTCCTCACGCCCTGCTATCACCCCAACGTGGACACCCAGGGTAACATATGCCTGGACATCCTGAAGGA | |
| | AAAGTGGTCTGCCCTGTATGATGTCAGGACCATTCTGCTCTCCATCCAGAGCCTTCTAGGAGAACCCAAC | |
| | ATTGATAGTCCCTTGAACACACATGCTGCCGAGCTCTGGAAAAACCCCACAGCTTTTAAGAAGTACCTGC | |
| | AAGAAACCTACTCAAAGCAGGTCACCAGCCAGGAGCCCTGACCCAGGCTGCCCAGCCTGTCCTTGTGTCG | |
| | TCTTTTTAATTTTTCCTTAGATGGTCTGTCCTTTTTGTGATTTCTGTATAGGACTCTTTATCTTGAGCTG | |
| | TGGTATTTTTGTTTTGTTTTTGTCTTTTAAATTAAGCCTCGGTTGAGCCCTTGTATATTAAATAAATGCA | |
| | TTTTTGTCCTTTTTTAAAAAAAAAATAAAAAAAAAAAAAAAAAAAAAAAAAAAAAAAAAAAAAAAAAAAA | |
| | A | |

[0027] The subset of the genes is at least 4, at least 5, at least 6, at least 7, at least 8, at least 9, at least 10, at least 11, at least 12, at least 13, at least 14, at least 15, at least 16, at least 17, at least 18, at least 19, at least 20, at least 21, at least 22, at least 23, at least 24, at least 25, at least 26, at least 27, at least 28, at least 29, at least 30, at least 31, at least 32, at least 33, at least 34, at least 35, at least 36, at least 37, at least 38, at least 39, at least 40, at least 41, at least 42, at least 43, at least 44, at least 45, at least 46, at least 47, at least 48, at least 49 or all 50 of the genes listed in Table 1B.

[0028] The average gene expression profile (also referred to herein as a centroid) of a normal non-tumor subtype were pre-defined from a training set of normal non-tumor breast samples using hierarchical clustering analysis of gene expression data. A normal non-tumor breast sample is a sample obtained from a subject that has not been diagnosed with breast cancer or previously treated for breast cancer. For example, the non-tumor breast samples may be breast reduction mammoplasty samples. A heatmap of the prototypical gene expression profile of the normal subtype (as well as the subtypes Basal-like, Her2-enriched, Luminal A and Luminal B) is shown in FIG. 1, where the level of expression is illustrated by the heatmap. Table 2 shows the actual values.

TABLE 2
Subtype Centroids for Comparison to a Sample
Subtype Centroids for Comparison to a Sample

| Target | Basal- | Her2- | Luminal | Luminal | |
|---|---|---|---|---|---|
| Gene | like | enriched | A | B | Normal |
| ACTR3B | −0.2052 | −0.7965 | −0.2790 | −0.4380 | 0.6676 |
| ANLN | 1.0227 | 0.5006 | −0.7289 | 0.1149 | −1.7879 |
| BAG1 | −0.4676 | −0.3132 | 0.4716 | 0.5879 | −0.3280 |
| BCL2 | −0.7365 | −0.7237 | 0.7234 | 0.6363 | 0.5144 |
| BIRC5 | 0.9542 | 0.4541 | −0.6921 | 0.3421 | −1.6821 |
| BLVRA | −0.8761 | 0.2270 | 0.1628 | 0.7138 | −0.2665 |
| CCNB1 | 0.7337 | 0.3114 | −0.8626 | 0.2165 | −1.5967 |
| CCNE1 | 1.3100 | 0.2201 | −0.6231 | −0.2729 | −1.0925 |
| CDC20 | 1.0995 | 0.1445 | −1.0518 | −0.1173 | −1.2069 |
| CDC6 | 0.5817 | 0.6601 | −0.7032 | 0.3134 | −1.2255 |
| CDCA1 | 0.9367 | 0.1623 | −0.4509 | 0.2692 | −1.9055 |
| CDH3 | 0.7639 | 0.0144 | −0.0502 | −1.0229 | 0.5007 |
| CENPF | 1.0222 | 0.2944 | −0.5657 | 0.2437 | −1.8612 |
| CEP55 | 1.0442 | 0.4881 | −0.6365 | 0.2921 | −1.9241 |
| CXXC5 | −0.9732 | 0.1866 | 0.5687 | 0.9463 | −0.3030 |
| EGFR | 0.3352 | −0.1326 | −0.0011 | −0.9755 | 1.4238 |
| ERBB2 | −0.7045 | 1.4182 | 0.2420 | 0.1978 | −0.5530 |
| ESR1 | −1.1847 | −0.4926 | 0.7177 | 1.0101 | 0.0087 |
| EXO1 | 1.0546 | 0.4317 | −0.7259 | 0.2559 | −1.6488 |
| FGFR4 | −0.2073 | 1.4562 | 0.1707 | −0.2223 | −0.5802 |
| FOXA1 | −1.3590 | 0.5726 | 0.7131 | 0.7963 | −0.2353 |
| FOXC1 | 1.0666 | −0.7362 | −0.4078 | −0.9877 | 0.6650 |
| GPR160 | −1.0540 | 0.5524 | 0.6032 | 0.7305 | −0.3224 |
| GRB7 | −0.4848 | 1.3418 | 0.0124 | 0.0690 | −0.2520 |
| KIF2C | 0.9242 | 0.1104 | −1.1001 | −0.2771 | −1.3455 |
| KNTC2 | 1.1373 | 0.2266 | −0.7593 | 0.1656 | −1.1881 |
| KRT14 | 0.4759 | −0.5269 | 0.8187 | −0.8879 | 1.1352 |
| KRT17 | 0.6863 | −0.3777 | 0.6149 | −1.1415 | 0.9238 |
| KRT5 | 0.7136 | −0.4146 | 0.5832 | −0.9462 | 1.0985 |
| MAPT | −1.1343 | −0.2711 | 1.0957 | 0.8372 | 0.4007 |
| MDM2 | −0.7498 | −0.4855 | −0.1788 | 0.2397 | 0.1097 |
| MELK | 1.0209 | 0.2678 | −0.8016 | 0.1012 | −1.6272 |
| MIA | 1.2408 | −0.5475 | 0.3289 | −0.6320 | 0.6975 |
| MKI67 | 1.0446 | 0.4630 | −0.6717 | 0.3161 | −1.7680 |
| MLPH | −1.4150 | 0.4842 | 0.8829 | 0.8194 | −0.2419 |
| MMP11 | −0.1295 | 0.5220 | 0.3402 | 0.5653 | −1.7370 |
| MYBL2 | 0.9571 | 0.5492 | −0.7814 | 0.1548 | −1.4404 |
| MYC | 0.5639 | −0.9904 | −0.3015 | −0.2791 | 0.9833 |
| NAT1 | −0.9711 | −0.2708 | 1.2256 | 0.9576 | −0.5287 |
| ORC6L | 1.0086 | 0.5152 | −1.0385 | −0.0336 | −1.4084 |
| PGR | −0.9216 | −0.5755 | 1.2061 | 0.9278 | 0.6220 |
| PHGDH | 0.9192 | 0.0322 | −0.5194 | −0.5371 | 0.5184 |
| PTTG1 | 0.9541 | 0.2079 | −1.1207 | 0.1052 | −1.4067 |
| RRM2 | 0.7895 | 0.6336 | −0.8099 | 0.3228 | −1.7630 |
| SFRP1 | 0.7694 | −0.8271 | 0.2617 | −1.0846 | 1.3790 |
| SLC39A6 | −0.9992 | −0.4573 | 0.6607 | 0.9222 | −0.2463 |
| TMEM45B | −1.0721 | 0.7926 | 0.3190 | 0.2016 | −0.2250 |
| TYMS | 0.9823 | −0.0960 | −0.8593 | 0.1827 | −1.3192 |
| UBE2C | 0.8294 | 0.3358 | −1.0141 | 0.0608 | −1.7637 |
| UBE2T | 0.6258 | 0.0617 | −0.8652 | −0.0487 | −1.8602 |

[0029] One embodiment of the method of the present invention is summarized in FIG. 2. First, a breast sample is obtained and then stained by H & E. The sample can be fixed or preserved using various methods known in the art, such as formalin-fixed paraffin embedded (FFPE). Upon review by a pathologist, the tumor area is marked, for example, circled, to delineate tumor tissue from surrounding non-tumor tissue and determine whether there is a sufficient amount of tumor cells for further processing. The unstained tissue sections are mounted onto slides. Macrodissection, referring to manual dissection of the fixed tissue sample, is guided by the marked histologic section to isolate the fixed tumor tissue for further analysis. RNA is extracted from the tumor tissue and the RNA quality and quantity is determined using methods known in the art. Up to 10 different tumor samples can be analyzed. The genes detected are selected from the genes listed in Table 1A; preferably, the genes detected are those listed in Table 1B, or a subset thereof. The samples are hybridized to reference samples, for example, by incubation on a heatblock. The sample is processed and data is collected via a digital analyzer. The data is processed, for example, normalized and scaled to control housekeeping genes and reference samples. A computation algorithm based on a Pearson's correlation compares the normalized and scaled gene expression profile of the subset of genes used to generate the gene expression profile of the test sample to the prototypical normal expression signature, or normal centroid. A normal tissue risk score is determined. FIG. 3 provides a schematic of the specific algorithm transformations.

[0030] The normal tissue risk score is on a −1 to +1 scale. A score value closer to −1 indicates a less favorable outcome while a score value closer to +1 indicates a more favorable outcome. For example, a score value closer to −1 indicates a higher risk of recurrence. A score value closer to +1 indicates a lower risk of recurrence. In some instances, the scores can also be adjusted by various algorithms to a risk score on a 0-100 scale, where 0 indicates a lower risk of recurrence and more favorable outcome and a score of 100 indicates a higher risk of recurrence and less favorable outcome. The scores can be used to further stratify subjects into sub-categories, such as subjects with high, intermediate, or low risk of recurrence groups.

[0031] Classifying Tumor Subtypes

[0032] The present invention also provides a method that further includes determining or classifying the cancer or tumor subtype of the tumor sample, wherein the cancer or tumor subtype is selected from the group consisting of at least Basal-like, Luminal A, Luminal B and HER2-enriched.

[0033] The genes listed in Tables 1A and 1B, as described in Perou et al. (2000) Nature 406:747-752, are statistically selected to have low variation in expression between biological sample replicates from the same individual and high variation in expression across samples from different individuals. Thus, the genes listed in Table 1A or Table 1B are used as classifier genes for breast cancer classification. Although clinical information was not used to derive the breast cancer subtypes, this classification has proved to have prognostic significance. Gene screening as described herein can be used to classify breast cancers into various subtypes. The major subtypes of breast cancer are referred to as Luminal A (LumA), Luminal B (LumB), HER2-enriched (Her-2-E), Basal-like, and Normal-like.

[0034] The PAM50 gene expression assay (Parker et al. J Clin Oncol., 27(8):1160-7 (2009) and International Publication No. WO 2009/158143 and U.S. Patent Publication No. 2011/0145176, incorporated herein by reference, in their entireties) is able to identify a cancer subtype from standard formalin fixed paraffin embedded tumor tissue. The methods utilize a supervised algorithm to classify subject samples according to breast cancer subtype. This algorithm, referred to herein as the PAM50 classification model, is based on the gene expression profile of a defined subset of genes that has been identified herein as superior for classifying breast cancer subtypes, exemplified in Table 1B. The prototypical gene expression profiles (i.e. centroid) of the four subtypes were pre-defined from a training set of FFPE breast tumor samples using hierarchical clustering analysis of gene expression data. A heatmap of the prototypical gene expression profiles of these four subtypes is shown in FIG. 1, where the level of expression is illustrated by the heatmap. Table 3 also shows the actual values.

[0035] After performing the Breast Cancer Subtyping test with a test breast cancer tumor sample, a computational algorithm based on a Pearson's correlation compares the normalized and scaled gene expression profile of the gene set in Table 1B of the test sample to the prototypical expression signatures of the four breast cancer subtypes. The tumor sample is assigned the subtype with the largest positive correlation to the sample. Kaplan Meier survival curves generated from a training set of untreated breast cancer patients demonstrate that the cancer subtypes are a prognostic indicator of recurrence free survival (RFS) in this test population, which includes both estrogen receptor positive/negative and HER2 positive/negative patients.

[0036] Description of Breast Cancer Subtype Biology

[0037] Luminal subtypes: The most common subtypes of breast cancer are the luminal subtypes, Luminal A and Luminal B. Prior studies suggest that luminal A comprises approximately 30% to 40% and luminal B approximately 20% of all breast cancers, but they represent over 90% of hormone receptor positive breast cancers (Nielsen et al. Clin. Cancer Res., 16(21):5222-5232 (2009)). The gene expression pattern of these subtypes resembles the luminal epithelial component of the breast. These tumors are characterized by high expression of estrogen receptor (ER), progesterone receptor (PR), and genes associated with ER activation, such as LIV1, GATA3, and cyclin D1, as well as expression of luminal cytokeratins 8 and 18 (Lisa Carey & Charles Perou (2009). Gene Arrays, Prognosis, and Therapeutic Interventions. Jay R. Harris et al. (4th ed.), Diseases of the breast (pp. 458-472). Philadelphia, Pa.: Lippincott Williams & Wilkins).

[0038] Luminal A: Luminal A (LumA) breast cancers exhibit low expression of genes associated with cell cycle activation and the ERBB2 cluster resulting in a better prognosis than Luminal B. The Luminal A subgroup has the most favorable prognosis of all subtypes and is enriched for endocrine therapy-responsive tumors.

[0039] Luminal B: Luminal B (LumB) breast cancers also express ER and ER-associated genes. Genes associated with cell cycle activation are highly expressed and this tumor type can be HER2(+) (˜20%) or HER2(−). The prognosis is unfavorable (despite ER expression) and endocrine therapy responsiveness is generally diminished relative to LumA.

[0040] HER2-enriched: The HER2-enriched subtype is generally ER-negative and is HER2-positive in the majority of cases with high expression of the ERBB2 cluster, including ERBB2 and GRB7. Genes associated with cell cycle activation are highly expressed and these tumors have a poor outcome.

[0041] Basal-like: The Basal-like subtype is generally ER-negative, is almost always clinically HER2-negative and expresses a suite of “basal” biomarkers including the basal epithelial cytokeratins (CK) and epidermal growth factor receptor (EGFR). Genes associated with cell cycle activation are highly expressed.

[0042] Determining Risk of Recurrence (ROR-PT) Score

[0043] The present invention also provides a method that further includes determining a proliferation score based on the expression of a subset of proliferation genes listed in Table 1A or 1B. In one embodiment, the ROR or ROR-PT score is also determined.

[0044] The training set of FFPE breast tumor samples from the Breast Cancer Subtyping test, which had well defined clinical characteristics and clinical outcome data, were used to establish a continuous Risk of Recurrence (ROR) score. The score is calculated using coefficients from a Cox model that includes correlation to each cancer subtype, a proliferation score (mean gene expression of a subset of the genes in Table 1A or 1B), and tumor size, Table 3.

TABLE 3
Coefficients to calculate ROR-PT (equation 1)

| Test Variables | Coefficient |
|---|---|
| Basal-like Pearson's correlation (A) | −0.0067 |
| Her2-enriched Pearson's correlation (B) | 0.4317 |
| Luminal A Pearson's correlation (C) | −0.3172 |
| Luminal B Pearson's correlation (D) | 0.4894 |
| Proliferation Score (E) | 0.1981 |
| Tumor Size (F) | 0.1133 |

[0045] The test variables in Table 3 are multiplied by the corresponding coefficients and summed to produce a risk score (“ROR-PT”).

ROR-PT equation=−0.0067*A+0.4317*B+−0.3172*C+0.4894*D+0.1981*E+0.1133*F

[0046] In previous studies, the ROR score provided a continuous estimate of the risk of recurrence for ER-positive, node-negative patients who were treated with tamoxifen for 5 years (Nielsen et al. Clin. Cancer Res., 16(21):5222-5232 (2009)). The ROR score also exhibited a statistically significant improvement over a clinical model based in determining RFS within this test population providing further evidence of the improved accuracy of this decision making tool when compared to traditional clinicopathological measures (Nielsen et al. Clin. Cancer Res., 16(21):5222-5232 (2009)).

[0047] The gene set contains many genes that are known markers for proliferation. The methods of the present invention provide for the determination of subsets of genes that provide a proliferation signature. The methods of the present invention can include determining the expression of at least one of, a combination of, or each of, a 21-gene subset of the genes of Table 1A or 1B selected from ANLN, BIRC5, CCNB1, CCNE1, CDC20, CDC6, CDCA1, CENPF, CEP55, EXO1, KIF2C, KNTC2, MELK, MKI67, MYBL2, ORC6L, PTTG1, RRM2, TYMS, UBE2C and/or UBE2T. The methods of the present invention can include determining the expression of at least one of, a combination of, or each of, a 19-gene subset of the genes of Table 1A or 1B selected from ANLN, CCNB1, CCNE1, CDC20, CDC6, CDCA1, CENPF, CEP55, EXO1, KIF2C, KNTC2, MELK, MKI67, ORC6L, PTTG1, RRM2, TYMS, UBE2C and/or UBE2T. The methods of the present invention can include determining the expression of at least one of, a combination of, or each of, a 18-gene subset of the genes of Table 1A or 1B selected from ANLN, CCNE1, CDC20, CDC6, CDCA1, CENPF, CEP55, EXO1, KIF2C, KNTC2, MELK, MKI67, ORC6L, PTTG1, RRM2, TYMS, UBE2C and/or UBE2T. The methods of the present invention can include determining the expression of at least one of, a combination of, or each of, an 11-gene subset of the genes of Table 1A or 1B selected from BIRC5, CCNB1, CDC20, CDCA1/NUF2, CEP55, KNTC2/NDC80, MKI67, PTTG1, RRM2, TYMS and/or UBE2C. The methods of the present invention can include determining the expression of at least one of, a combination of, or each of, a 10-gene subset of the genes of Table 1A or 1B selected from ANLN, CCNB1, CDC20, CENPF, CEP55, KIF2C, MKI67, MYBL2, RRM2 and/or UBE2C. The expression of one or more of these genes may be determined and a proliferation signature index can be generated by averaging the normalized expression estimates of one or more of these genes in a sample. The sample can be assigned a high proliferation signature, a moderate/intermediate proliferation signature, a low proliferation signature or an ultra-low proliferation signature. Methods of determining a proliferation signature from a biological sample are as described in Nielsen et al. Clin. Cancer Res., 16(21):5222-5232 (2009) and supplemental online material (these documents are incorporated herein, by reference, in their entireties).

[0048] In one embodiment, outcome is predicted based on classification of a subject according to subtype. This classification is based on expression profiling using the list of genes listed in Table 1B. In addition to providing a subtype assignment, the PAM50/NANO46 bioinformatics model provides a measurement of the similarity of a test sample to all four subtypes which is translated into a Risk of Recurrence (ROR) score that can be used in any patient population regardless of disease status and treatment options. The cancer subtypes and ROR also have value in the prediction of pathological complete response in women treated with, for example, neoadjuvant taxane and anthracycline chemotherapy (Rouzier et al., J Clin Oncol 23:8331-9 (2005), incorporated herein by reference in its entirety). Thus, in various embodiments of the present disclosure, a risk of recurrence (ROR) model is used to predict outcome. Using these risk models, subjects can be stratified into low, medium, and high risk of recurrence groups. Calculation of ROR can provide prognostic information to guide treatment decisions and/or monitor response to therapy.

[0049] In some embodiments described herein, the prognostic performance of the PAM50/NANO46-defined cancer subtypes and/or other clinical parameters is assessed utilizing a Cox Proportional Hazards Model Analysis, which is a regression method for survival data that provides an estimate of the hazard ratio and its confidence interval. The Cox model is a well-recognized statistical technique for exploring the relationship between the survival of a patient and particular variables. This statistical method permits estimation of the hazard (i.e., risk) of individuals given their prognostic variables (e.g., gene expression profile with or without additional clinical factors, as described herein). The “hazard ratio” is the risk of death at any given time point for patients displaying particular prognostic variables. See generally Spruance et al., Antimicrob. Agents & Chemo. 48:2787-92 (2004).

[0050] The PAM50/NANO46 classification model described herein can be trained for risk of recurrence using subtype distances (or correlations) alone, or using subtype distances with clinical variables as discussed supra. In one embodiment, the risk score for a test sample is calculated using cancer subtype distances alone using the following equation:

[0051] ROR=0.05*Basal+0.11*Her2+−0.25*LumA+0.07*LumB+−0.11*Normal, where the variables “Basal,” “Her2,” “LumA,” “LumB,” and “Normal” are the distances to the centroid for each respective classifier when the expression profile from a test sample is compared to centroids constructed using the gene expression data deposited with the Gene Expression Omnibus (GEO).

[0052] Risk score can also be calculated using a combination of breast cancer subtype and the clinical variables tumor size (T) and lymph nodes status (N) using the following equation: ROR (full)=0.05*Basal+0.1*Her2+−0.19*LumA+0.05*LumB+−0.09*Normal+0.16*T+0.08*N, again when comparing test expression profiles to centroids constructed using the gene expression data deposited with GEO as accession number GSE2845.

[0053] In yet another embodiment, risk score for a test sample is calculated using cancer subtype distances alone using the following equation:

[0054] ROR-S=0.05*Basal+0.12*Her2+−0.34*LumA+0.0.23*LumB, where the variables “Basal,” “Her2,” “LumA,” and “LumB” are as described supra and the test expression profiles are compared to centroids constructed using the gene expression data deposited with GEO as accession number GSE2845. In yet another embodiment, risk score can also be calculated using a combination of breast cancer subtype and the clinical variable tumor size (T) using the following equation (where the variables are as described supra): ROR-C=0.05*Basal+0.11*Her2+−0.23*LumA+0.09*LumB+0.17*T.

[0055] In yet another embodiment, risk score for a test sample is calculated using cancer subtype distances in combination with the proliferation signature (“Prolif”) using the following equation:

[0056] ROR-P=−0.001*Basal+0.7*Her2+−0.95*LumA+0.49*LumB+0.34*Prolif, where the variables “Basal,” “Her2,” “LumA,” “LumB” and “Prolif” are as described supra and the test expression profiles are compared to centroids constructed using the gene expression data deposited with GEO as accession number GSE2845.

[0057] In yet another embodiment, risk score can also be calculated using a combination of breast cancer subtype, proliferation signature and the clinical variable tumor size (T) using the ROR-PT described in conjunction with Table 4 supra.

[0058] Clinical Variables

[0059] The normal tissue risk score described herein may be further combined with information on clinical variables to generate a continuous risk of relapse (ROR) predictor. As described herein, a number of clinical and prognostic breast cancer factors are known in the art and are used to predict treatment outcome and the likelihood of disease recurrence. Such factors include, for example, lymph node involvement, tumor size, histologic grade, estrogen and progesterone hormone receptor status, HER-2 levels, and tumor ploidy. In one embodiment, normal tissue risk score is provided for a subject diagnosed with or suspected of having breast cancer. For example, the normal tissue risk score can be used in combination with clinical factors of lymph node status (N) and tumor size (T). Assessment of clinical variables is based on the American Joint Committee on Cancer (AJCC) standardized system for breast cancer staging. In this system, primary tumor size is categorized on a scale of 0-4 (TO: no evidence of primary tumor; T1:<2 cm; T2:>2 cm-<5 cm; T3:>5 cm; T4: tumor of any size with direct spread to chest wall or skin). Lymph node status is classified as N0-N3 (NO: regional lymph nodes are free of metastasis; N1: metastasis to movable, same-side axillary lymph node(s); N2: metastasis to same-side lymph node(s) fixed to one another or to other structures; N3: metastasis to same-side lymph nodes beneath the breastbone). Methods of identifying breast cancer patients and staging the disease are well known and may include manual examination, biopsy, review of patient's and/or family history, and imaging techniques, such as mammography, magnetic resonance imaging (MRI), and positron emission tomography (PET).

[0060] Another clinical variable that may be used to calculate the normal tissue risk score is a proliferation score. The gene set of Table 1A and 1B contain many genes that are known markers for proliferation. For example, the subset of proliferation genes can be weighted together to calculated a proliferation score. A proliferation score can be calculated from at least one proliferation gene from Table 1A and 1B. For example, the proliferation genes can include, but are not limited to ANLN, BIRC5, CCNB1, CCNE1, CDC20, CDC6, CDCA1, CENPF, CEP55, EXO1, KIF2C, KNTC2, MELK, MKI67, MYBL2, ORC6L, PTTG1, RRM2, TYMS, UBE2C and/or UBE2T. Additionally, non-proliferation genes can be normalized, scaled, and weighted individually.

[0061] Clinical variable scores, such as the proliferation score, can be used in a regression model, i.e., a Cox proportional hazard model, to calculate the relative risk or hazard ratio of each variable. Weighting coefficients can then be determined to calculate a new normal tissue risk score, which incorporates the information from each clinical variable and thereby increases the prognostic value of the risk score. The new risk score is compared to an optimized cutpoint risk score which can be used to stratify the sample into a group, i.e. a higher risk group from a lower risk group.

[0062] Sample Source

[0063] In one embodiment of the present disclosure, the normal subtype or similarity to the normal subtype is assessed through the evaluation of expression patterns, or profiles, of the genes listed in Table 1 in one or more subject samples. For the purpose of discussion, the term subject, or subject sample, refers to an individual regardless of health and/or disease status. A subject can be a subject, a study participant, a control subject, a screening subject, or any other class of individual from whom a sample is obtained and assessed in the context of the disclosure. Accordingly, a subject can be diagnosed with breast cancer, can present with one or more symptoms of breast cancer, or a predisposing factor, such as a family (genetic) or medical history (medical) factor, for breast cancer, can be undergoing treatment or therapy for breast cancer, or the like. Alternatively, a subject can be healthy with respect to any of the aforementioned factors or criteria. It will be appreciated that the term “healthy” as used herein, is relative to breast cancer status, as the term “healthy” cannot be defined to correspond to any absolute evaluation or status. Thus, an individual defined as healthy with reference to any specified disease or disease criterion, can in fact be diagnosed with any other one or more diseases, or exhibit any other one or more disease criterion, including one or more cancers other than breast cancer. However, the healthy controls are preferably free of any cancer. A normal non-tumor breast sample is a sample obtained from a subject that has not been diagnosed with breast cancer. Preferably, a normal non-tumor breast sample is a breast reduction mammoplasty sample from a healthy subject, not diagnosed or previously treated for breast cancer.

[0064] In particular embodiments, the methods for predicting outcome include collecting a biological sample comprising a cancer cell or tissue, such as a breast tissue sample or a primary breast tumor tissue sample. By “biological sample” is intended any sampling of cells, tissues, or bodily fluids in which expression of a gene can be detected. Examples of such biological samples include, but are not limited to, biopsies and smears. Bodily fluids useful in the present disclosure include blood, lymph, urine, saliva, nipple aspirates, gynecological fluids, or any other bodily secretion or derivative thereof. Blood can include whole blood, plasma, serum, or any derivative of blood. In some embodiments, the biological sample includes breast cells, particularly breast tissue from a biopsy, such as a breast tumor tissue sample. Biological samples may be obtained from a subject by a variety of techniques including, for example, by scraping or swabbing an area, by using a needle to aspirate cells or bodily fluids, or by removing a tissue sample (i.e., biopsy). Methods for collecting various biological samples are well known in the art. In some embodiments, a breast tissue sample is obtained by, for example, fine needle aspiration biopsy, core needle biopsy, or excisional biopsy. Fixative and staining solutions may be applied to the cells or tissues for preserving the specimen and for facilitating examination. Biological samples, particularly breast tissue samples, may be transferred to a glass slide for viewing under magnification. In one embodiment, the biological sample is a formalin-fixed, paraffin-embedded breast tissue sample, particularly a primary breast tumor sample. In various embodiments, the tissue sample is obtained from a pathologist-guided tissue core sample.

[0065] Expression Profiling

[0066] In various embodiments, the present disclosure provides methods for prognosticating or monitoring breast cancer in subjects. In some embodiments, the present invention further provides methods for classifying breast cancer in subjects. In this embodiment, data obtained from analysis of gene expression is evaluated using one or more pattern recognition algorithms. Such analysis methods may be used to form a predictive model, which can be used to classify test data. For example, one convenient and particularly effective method of classification employs multivariate statistical analysis modeling, first to form a model (a “predictive mathematical model”) using data (“modeling data”) from samples of known subtype (e.g., from subjects known to have a particular breast cancer subtype: LumA, LumB, Basal-like, HER2-enriched, or normal-like), and second to classify an unknown sample (e.g., “test sample”) according to subtype. Pattern recognition methods have been used widely to characterize many different types of problems ranging, for example, over linguistics, fingerprinting, chemistry and psychology. In the context of the methods described herein, pattern recognition is the use of multivariate statistics, both parametric and non-parametric, to analyze data, and hence to classify samples and to predict the value of some dependent variable based on a range of observed measurements. There are two main approaches. One set of methods is termed “unsupervised” and these simply reduce data complexity in a rational way and also produce display plots which can be interpreted by the human eye. However, this type of approach may not be suitable for developing a clinical assay that can be used to classify samples derived from subjects independent of the initial sample population used to train the prediction algorithm.

[0067] The other approach is termed “supervised” whereby a training set of samples with known class or outcome is used to produce a mathematical model which is then evaluated with independent validation data sets. Here, a “training set” of gene expression data is used to construct a statistical model that predicts correctly the “subtype” of each sample, such as the normal subtype. This training set is then tested with independent data (referred to as a test or validation set) to determine the robustness of the computer-based model. These models are sometimes termed “expert systems,” but may be based on a range of different mathematical procedures. Supervised methods can use a data set with reduced dimensionality (for example, the first few principal components), but typically use unreduced data, with all dimensionality. In all cases the methods allow the quantitative description of the multivariate boundaries that characterize and separate each subtype in terms of its gene expression profile. It is also possible to obtain confidence limits on any predictions, for example, a level of probability to be placed on the goodness of fit. The robustness of the predictive models can also be checked using cross-validation, by leaving out selected samples from the analysis.

[0068] The normal tissue risk score test described herein is based on the gene expression profile for a plurality of subject samples using the genes listed in Tables 1A or 1B. The PAM50/NANO46 classification model described herein is based on the gene expression profile for a plurality of subject samples using the genes listed in Tables 1A or 1B. The plurality of samples includes a sufficient number of samples derived from subjects belonging to each subtype class. By “sufficient samples” or “representative number” in this context is intended a quantity of samples derived from each subtype that is sufficient for building a classification model that can reliably distinguish each subtype from all others in the group. A supervised prediction algorithm is developed based on the profiles of objectively-selected prototype samples for “training” the algorithm. The samples are selected and subtyped using an expanded gene set according to the methods disclosed in International Patent Publication WO 2007/061876 and U.S. Patent Publication No. 2009/0299640, each of which is herein incorporated by reference in its entirety. Alternatively, the samples can be subtyped according to any known assay for classifying breast cancer subtypes. After stratifying the training samples according to subtype, a centroid-based prediction algorithm is used to construct centroids based on the expression profile of the gene set, or a subset of the genes, described in Tables 1A and 1B.

[0069] In one embodiment, the prediction algorithm is the nearest centroid methodology related to that described in Narashiman and Chu (2002) PNAS 99:6567-6572, which is herein incorporated by reference in its entirety. In the present disclosure, the method computes a standardized centroid for each subtype. This centroid is the average gene expression for each gene in each subtype (or “class”) divided by the within-class standard deviation for that gene. Nearest centroid classification takes the gene expression profile of a new sample, and compares it to each of these class centroids. Subtype prediction is done by calculating the Spearman's rank correlation of each test case to the five centroids, and assigning a sample to a subtype based on the nearest centroid.

[0070] Detection of Gene Expression

[0071] Any methods available in the art for detecting expression of the genes listed in Tables 1A and 1B are encompassed herein. By “detecting expression” is intended determining the quantity or presence of an RNA transcript or its expression product of an gene. Methods for detecting expression of the genes of the disclosure, that is, gene expression profiling, include methods based on hybridization analysis of polynucleotides, methods based on sequencing of polynucleotides, immunohistochemistry methods, and proteomics-based methods. The methods generally detect expression products (e.g., mRNA) of the genes listed in Tables 1A and 1B. In preferred embodiments, PCR-based methods, such as reverse transcription PCR(RT-PCR) (Weis et al., TIG 8:263-64, 1992), and array-based methods such as microarray (Schena et al., Science 270:467-70, 1995) are used. By “microarray” is intended an ordered arrangement of hybridizable array elements, such as, for example, polynucleotide probes, on a substrate. The term “probe” refers to any molecule that is capable of selectively binding to a specifically intended target biomolecule, for example, a nucleotide transcript or a protein encoded by or corresponding to a gene. Probes can be synthesized by one of skill in the art, or derived from appropriate biological preparations. Probes may be specifically designed to be labeled. Examples of molecules that can be utilized as probes include, but are not limited to, RNA, DNA, proteins, antibodies, and organic molecules.

[0072] Many expression detection methods use isolated RNA. The starting material is typically total RNA isolated from a biological sample, such as a tumor or tumor cell line, and corresponding normal tissue or cell line, respectively. If the source of RNA is a primary tumor, RNA (e.g., mRNA) can be extracted, for example, from frozen or archived paraffin-embedded and fixed (e.g., formalin-fixed) tissue samples (e.g., pathologist-guided tissue core samples).

[0073] General methods for RNA extraction are well known in the art and are disclosed in standard textbooks of molecular biology, including Ausubel et al., ed., Current Protocols in Molecular Biology, John Wiley & Sons, New York 1987-1999. Methods for RNA extraction from paraffin embedded tissues are disclosed, for example, in Rupp and Locker, Lab Invest. 56:A67, (1987); and De Andres et al. Biotechniques 18:42-44, (1995). In particular, RNA isolation can be performed using a purification kit, a buffer set and protease from commercial manufacturers, such as Qiagen (Valencia, Calif.), according to the manufacturer's instructions. For example, total RNA from cells in culture can be isolated using Qiagen RNeasy mini-columns. Other commercially available RNA isolation kits include MASTERPURE™ Complete DNA and RNA Purification Kit (Epicentre, Madison, Wis.) and Paraffin Block RNA Isolation Kit (Ambion, Austin, Tex.). Total RNA from tissue samples can be isolated, for example, using RNA Stat-60 (Tel-Test, Friendswood, Tex.). RNA prepared from a tumor can be isolated, for example, by cesium chloride density gradient centrifugation. Additionally, large numbers of tissue samples can readily be processed using techniques well known to those of skill in the art, such as, for example, the single-step RNA isolation process of Chomczynski (U.S. Pat. No. 4,843,155). Isolated RNA can be used in hybridization or amplification assays that include, but are not limited to, PCR analyses and probe arrays. One method for the detection of RNA levels involves contacting the isolated RNA with a nucleic acid molecule (probe) that can hybridize to the mRNA encoded by the gene being detected. The nucleic acid probe can be, for example, a full-length cDNA, or a portion thereof, such as an oligonucleotide of at least 7, 15, 30, 60, 100, 250, or 500 nucleotides in length and sufficient to specifically hybridize under stringent conditions to an gene of the present disclosure, or any derivative DNA or RNA. Hybridization of an mRNA with the probe indicates that the gene in question is being expressed. In one embodiment, the mRNA is immobilized on a solid surface and contacted with a probe, for example by running the isolated mRNA on an agarose gel and transferring the mRNA from the gel to a membrane, such as nitrocellulose. In an alternative embodiment, the probes are immobilized on a solid surface and the mRNA is contacted with the probes, for example, in an Agilent gene chip array. A skilled artisan can readily adapt known mRNA detection methods for use in detecting the level of expression of the genes of the present disclosure.

[0074] An alternative method for determining the level of gene expression product in a sample involves the process of nucleic acid amplification, for example, by RT-PCR (U.S. Pat. No. 4,683,202), ligase chain reaction (Barany, PNAS USA 88: 189-93, (1991)), self sustained sequence replication (Guatelli et al., Proc. Natl. Acad. Sci. USA 87: 1874-78, (1990)), transcriptional amplification system (Kwoh et al., Proc. Natl. Acad. ScL USA 86: 1173-77, (1989)), Q-Beta Replicase (Lizardi et al., Bio/Technology 6:1197, (1988)), rolling circle replication (U.S. Pat. No. 5,854,033), or any other nucleic acid amplification method, followed by the detection of the amplified molecules using techniques well known to those of skill in the art. These detection schemes are especially useful for the detection of nucleic acid molecules if such molecules are present in very low numbers.

[0075] In particular aspects of the disclosure, gene expression is assessed by quantitative RT-PCR. Numerous different PCR or QPCR protocols are known in the art and exemplified herein below and can be directly applied or adapted for use using the presently-described compositions for the detection and/or quantification of the genes listed ins Table 1A or 1B. Generally, in PCR, a target polynucleotide sequence is amplified by reaction with at least one oligonucleotide primer or pair of oligonucleotide primers. The primer(s) hybridize to a complementary region of the target nucleic acid and a DNA polymerase extends the primer(s) to amplify the target sequence. Under conditions sufficient to provide polymerase-based nucleic acid amplification products, a nucleic acid fragment of one size dominates the reaction products (the target polynucleotide sequence which is the amplification product). The amplification cycle is repeated to increase the concentration of the single target polynucleotide sequence. The reaction can be performed in any thermocycler commonly used for PCR. However, preferred are cyclers with real time fluorescence measurement capabilities, for example, SMARTCYCLER® (Cepheid, Sunnyvale, Calif.), ABI PRISM 7700® (Applied Biosystems, Foster City, Calif.), ROTOR-GENE™ (Corbett Research, Sydney, Australia), LIGHTCYCLER® (Roche Diagnostics Corp, Indianapolis, Ind.), ICYCLER® (Biorad Laboratories, Hercules, Calif.) and MX4000® (Stratagene, La Jolla, Calif.).

[0076] In another embodiment of the disclosure, microarrays are used for expression profiling. Microarrays are particularly well suited for this purpose because of the reproducibility between different experiments. DNA microarrays provide one method for the simultaneous measurement of the expression levels of large numbers of genes. Each array consists of a reproducible pattern of capture probes attached to a solid support. Labeled RNA or DNA is hybridized to complementary probes on the array and then detected by laser scanning. Hybridization intensities for each probe on the array are determined and converted to a quantitative value representing relative gene expression levels. See, for example, U.S. Pat. Nos. 6,040,138, 5,800,992 and 6,020,135, 6,033,860, and 6,344,316. High-density oligonucleotide arrays are particularly useful for determining the gene expression profile for a large number of RNAs in a sample.

[0077] In a preferred embodiment, the nCounter® Analysis system is used to detect gene expression. The basis of the nCounter® Analysis system is the unique code assigned to each nucleic acid target to be assayed (International Patent Publication No. WO 08/124,847, U.S. Pat. No. 8,415,102 and Geiss et al. Nature Biotechnology. 2008. 26(3): 317-325; the contents of which are each incorporated herein by reference in their entireties). The code is composed of an ordered series of colored fluorescent spots which create a unique barcode for each target to be assayed. A pair of nucleic acid probes is designed for each DNA or RNA target of Table 1A or 1B, a capture probe and a reporter probe carrying the fluorescent barcode. This system is also referred to, herein, as the nanoreporter code system.

[0078] Specific reporter and capture probes are synthesized for each target. Briefly, sequence-specific DNA oligonucleotide probes are attached to code-specific reporter molecules. Capture probes are made by ligating a second sequence-specific DNA oligonucleotide for each target to a universal oligonucleotide containing biotin, or another suitable moiety. Reporter and capture probes are all pooled into a single hybridization mixture, the “probe library”.

[0079] The relative abundance of each target is measured in a single multiplexed hybridization reaction. The sample is combined with the probe library, and hybridization occurs in solution. After hybridization, the tripartite hybridized complexes are purified in a two-step procedure using magnetic beads linked to oligonucleotides complementary to universal sequences present on the capture and reporter probes. This dual purification process allows the hybridization reaction to be driven to completion with a large excess of target-specific probes, as they are ultimately removed, and, thus, do not interfere with binding and imaging of the sample. All post hybridization steps are handled robotically on a custom liquid-handling robot (Prep Station, NanoString Technologies, Inc.).

[0080] Purified reactions are deposited by the Prep Station into individual flow cells of a sample cartridge, bound to a streptavidin-coated surface via the capture probe, electrophoresed to elongate the reporter probes, and immobilized. After processing, the sample cartridge is transferred to a fully automated imaging and data collection device (Digital Analyzer, NanoString Technologies, Inc.). The expression level of a target is measured by imaging each sample and counting the number of times the code for that target is detected. For each sample, typically 600 fields-of-view (FOV) are imaged (1376×1024 pixels) representing approximately 10 mm² of the binding surface. Typical imaging density is 100-1200 counted reporters per field of view depending on the degree of multiplexing, the amount of sample input, and overall target abundance. Data is output in simple spreadsheet format listing the number of counts per target, per sample.

[0081] This system can be used along with nanoreporters. Additional disclosure regarding nanoreporters can be found in International Publication Nos. WO 07/076,129 and WO 07/076,132 and U.S. Patent Publication Nos. 2010/0015607 and 2010/0261026, the contents of which are incorporated herein in their entireties. Further, the term nucleic acid probes and nanoreporters can include the rationally designed (e.g. synthetic sequences) described in International Publication No. WO 2010/019826 and U.S. Pat. No. 8,519,115, incorporated herein by reference in its entirety.

[0082] Data Processing

[0083] It is often useful to pre-process gene expression data, for example, by addressing missing data, translation, scaling, normalization, weighting, etc. Multivariate projection methods, such as principal component analysis (PCA) and partial least squares analysis (PLS), are so-called scaling sensitive methods. By using prior knowledge and experience about the type of data studied, the quality of the data prior to multivariate modeling can be enhanced by scaling and/or weighting. Adequate scaling and/or weighting can reveal important and interesting variation hidden within the data, and therefore make subsequent multivariate modeling more efficient. Scaling and weighting may be used to place the data in the correct metric, based on knowledge and experience of the studied system, and therefore reveal patterns already inherently present in the data.

[0084] “Translation” of the descriptor coordinate axes can be useful. Examples of such translation include normalization and mean centering. “Normalization” may be used to remove sample-to-sample variation. For microarray data, the process of normalization aims to remove systematic errors by balancing the fluorescence intensities of the two labeling dyes. The dye bias can come from various sources including differences in dye labeling efficiencies, heat and light sensitivities, as well as scanner settings for scanning two channels. Some commonly used methods for calculating normalization factor include: (i) global normalization that uses all genes on the array; (ii) housekeeping genes normalization that uses constantly expressed housekeeping/invariant genes; and (iii) internal controls normalization that uses known amount of exogenous control genes added during hybridization (Quackenbush Nat. Genet. 32 (Suppl.), 496-501 (2002)). In one embodiment, the genes disclosed herein can be normalized to control housekeeping genes. For example, the housekeeping genes described in U.S. Patent Publication 2008/0032293, which is herein incorporated by reference in its entirety, can be used for normalization. Exemplary housekeeping genes include MRPL19, PSMC4, SF3A1, PUM1, ACTB, GAPD, GUSB, RPLPO, and TFRC. It will be understood by one of skill in the art that the methods disclosed herein are not bound by normalization to any particular housekeeping genes, and that any suitable housekeeping gene(s) known in the art can be used.

[0085] Many normalization approaches are possible, and they can often be applied at any of several points in the analysis. In one embodiment, microarray data is normalized using the LOWESS method, which is a global locally weighted scatter plot smoothing normalization function. In another embodiment, qPCR data is normalized to the geometric mean of set of multiple housekeeping genes.

[0086] “Mean centering” may also be used to simplify interpretation. Usually, for each descriptor, the average value of that descriptor for all samples is subtracted. In this way, the mean of a descriptor coincides with the origin, and all descriptors are “centered” at zero. In “unit variance scaling,” data can be scaled to equal variance. Usually, the value of each descriptor is scaled by 1/StDev, where StDev is the standard deviation for that descriptor for all samples. “Pareto scaling” is, in some sense, intermediate between mean centering and unit variance scaling. In pareto scaling, the value of each descriptor is scaled by 1/sqrt(StDev), where StDev is the standard deviation for that descriptor for all samples. In this way, each descriptor has a variance numerically equal to its initial standard deviation. The pareto scaling may be performed, for example, on raw data or mean centered data.

[0087] “Logarithmic scaling” may be used to assist interpretation when data have a positive skew and/or when data spans a large range, e.g., several orders of magnitude. Usually, for each descriptor, the value is replaced by the logarithm of that value. In “equal range scaling,” each descriptor is divided by the range of that descriptor for all samples. In this way, all descriptors have the same range, that is, 1. However, this method is sensitive to presence of outlier points. In “autoscaling,” each data vector is mean centered and unit variance scaled. This technique is a very useful because each descriptor is then weighted equally, and large and small values are treated with equal emphasis. This can be important for genes expressed at very low, but still detectable, levels.

[0088] In one embodiment, data is collected for one or more test samples and the normal tissue risk score is calculated as described herein. When comparing data from multiple analyses (e.g., comparing expression profiles for one or more test samples to the centroids constructed from samples collected and analyzed in an independent study), it will be necessary to normalize data across these data sets. In one embodiment, Distance Weighted Discrimination (DWD) is used to combine these data sets together (Benito et al. (2004) Bioinformatics 20(1): 105-114, incorporated by reference herein in its entirety). DWD is a multivariate analysis tool that is able to identify systematic biases present in separate data sets and then make a global adjustment to compensate for these biases; in essence, each separate data set is a multi-dimensional cloud of data points, and DWD takes two points clouds and shifts one such that it more optimally overlaps the other.

[0089] The methods described herein may be implemented and/or the results recorded using any device capable of implementing the methods and/or recording the results. Examples of devices that may be used include but are not limited to electronic computational devices, including computers of all types. When the methods described herein are implemented and/or recorded in a computer, the computer program that may be used to configure the computer to carry out the steps of the methods may be contained in any computer readable medium capable of containing the computer program. Examples of computer readable medium that may be used include but are not limited to diskettes, CD-ROMs, DVDs, ROM, RAM, and other memory and computer storage devices. The computer program that may be used to configure the computer to carry out the steps of the methods and/or record the results may also be provided over an electronic network, for example, over the internet, an intranet, or other network.

[0090] Calculation of Outcome

[0091] Provided herein are methods for predicting breast cancer outcome within the context of the normal subtype and optionally other clinical variables. Outcome may refer to overall or disease-specific survival, event-free survival, or outcome in response to a particular treatment or therapy. In particular, the methods may be used to predict the likelihood of long-term, disease-free survival. “Predicting the likelihood of survival of a breast cancer patient” is intended to assess the risk that a patient will die as a result of the underlying breast cancer. “Long-term, disease-free survival” is intended to mean that the patient does not die from or suffer a recurrence of the underlying breast cancer within a period of at least five years, or at least ten or more years, following initial diagnosis or treatment.

[0092] Detection of Subtypes

[0093] Immunohistochemistry for estrogen (ER), progesterone (PgR), HER2, and Ki67 was performed concurrently on serial sections with the standard streptavidin-biotin complex method with 3,3′-diaminobenzidine as the chromogen. Staining for ER, PgR, and HER2 interpretation can be performed as described previously (Cheang et al., Clin Cancer Res. 2008; 14(5):1368-1376), however any method known in the art may be used.

[0094] For example, a Ki67 antibody (clone SP6; ThermoScientific, Fremont, Calif.) can be applied at a 1:200 dilution for 32 minutes, by following the Ventana Benchmark automated immunostainer (Ventana, Tucson Ariz.) standard Cell Conditioner 1 (CC1, a proprietary buffer) protocol at 98° C. for 30 minutes. An ER antibody (clone SP1; ThermoFisher Scientific, Fremont Calif.) can be used at 1:250 dilution with 10-minute incubation, after an 8-minute microwave antigen retrieval in 10 mM sodium citrate (pH 6.0). Ready-to-use PR antibody (clone 1E2; Ventana) can be used by following the CC1 protocol as above. HER2 staining can be done with a SP3 antibody (ThermoFisher Scientific) at a 1:100 dilution after antigen retrieval in 0.05 M Tris buffer (pH 10.0) with heating to 95° C. in a steamer for 30 minutes. For HER2 fluorescent in situ hybridization (FISH) assay, slides can be hybridized with probes to LSI (locus-specific identifier) HER2/neu and to centromere 17 by use of the PathVysion HER-2 DNA Probe kit (Abbott Molecular, Abbott Park, Ill.) according to manufacturer's instructions, with modifications to pretreatment and hybridization as previously described (Brown L A, Irving J, Parker R, et al. Amplification of EMSY, a novel oncogene on 11q13, in high grade ovarian surface epithelial carcinomas. Gynecol Oncol. 2006; 100(2):264-270). Slides can then be counterstained with 4′,6-diamidino-2-phenylindole, stained material was visualized on a Zeiss Axioplan epifluorescent microscope, and signals were analyzed with a Metafer image acquisition system (Metasystems, Altlussheim, Germany). Biomarker expression from immunohistochemistry assays can then be scored by two pathologists, who were blinded to the clinicopathological characteristics and outcome and who used previously established and published criteria for biomarker expression levels that had been developed on other breast cancer cohorts.

[0095] Tumors were considered positive for ER or PR if immunostaining was observed in more than 1% of tumor nuclei, as described previously. Tumors were considered positive for HER2 if immunostaining was scored as 3+ according to HercepTest criteria, with an amplification ratio for fluorescent in situ hybridization of 2.0 or more being the cut point that was used to segregate immunohistochemistry equivocal tumors (scored as 2+) (Yaziji, et al., JAMA, 291(16):1972-1977 (2004)). Ki67 was visually scored for percentage of tumor cell nuclei with positive immunostaining above the background level by two pathologists.

[0096] Other methods can also be used to detect subtypes. These techniques include ELISA, Western blots, Northern blots, or FACS analysis.

[0097] Kits

[0098] The present disclosure also describes kits useful for providing prognostic information to identify subjects that have an increased or decreased risk of recurrence. These kits comprise a set of reporter probes, capture probes and/or primers specific for the genes listed in Tables 1A or 1B, or a subset thereof. The kit may further comprise a computer readable medium.

[0099] In one embodiment of the present disclosure, the capture probes are immobilized on an array. By “array” is intended a solid support or a substrate with peptide or nucleic acid probes attached to the support or substrate. Arrays typically comprise a plurality of different capture probes that are coupled to a surface of a substrate in different, known locations. The arrays of the disclosure comprise a substrate having a plurality of capture probes that can specifically bind a gene expression product. The number of capture probes on the substrate varies with the purpose for which the array is intended. The arrays may be low-density arrays or high-density arrays and may contain 4 or more, 8 or more, 12 or more, 16 or more, 32 or more addresses, but will minimally comprise capture probes for the genes, or a subset thereof, listed in Tables 1A or 1B.

[0100] Techniques for the synthesis of these arrays using mechanical synthesis methods are described in, e.g., U.S. Pat. No. 5,384,261, incorporated herein by reference in its entirety for all purposes. The array may be fabricated on a surface of virtually any shape or even a multiplicity of surfaces. Arrays may be probes (e.g., nucleic-acid binding probes) on beads, gels, polymeric surfaces, fibers such as fiber optics, glass or any other appropriate substrate, see U.S. Pat. Nos. 5,770,358, 5,789,162, 5,708,153, 6,040,193 and 5,800,992, each of which is hereby incorporated in its entirety for all purposes. Arrays may be packaged in such a manner as to allow for diagnostics or other manipulation on the device. See, for example, U.S. Pat. Nos. 5,856,174 and 5,922,591 herein incorporated by reference.

[0101] In another embodiment, the kit comprises a set of oligonucleotide primers sufficient for the detection and/or quantitation of each of the genes listed in Tables 1A or 1B, or a subset thereof. The oligonucleotide primers may be provided in a lyophilized or reconstituted form, or may be provided as a set of nucleotide sequences. In one embodiment, the primers are provided in a microplate format, where each primer set occupies a well (or multiple wells, as in the case of replicates) in the microplate. The microplate may further comprise primers sufficient for the detection of one or more housekeeping genes as discussed infra. The kit may further comprise reagents and instructions sufficient for the amplification of expression products from the genes listed in Tables 1A or 1B, or a subset thereof.

[0102] In order to facilitate ready access, e.g., for comparison, review, recovery, and/or modification, the molecular signatures/expression profiles are typically recorded in a database. Most typically, the database is a relational database accessible by a computational device, although other formats, e.g., manually accessible indexed files of expression profiles as photographs, analogue or digital imaging readouts, spreadsheets, etc. can be used. Regardless of whether the expression patterns initially recorded are analog or digital in nature, the expression patterns, expression profiles (collective expression patterns), and molecular signatures (correlated expression patterns) are stored digitally and accessed via a database. Typically, the database is compiled and maintained at a central facility, with access being available locally and/or remotely.

### DEFINITIONS

[0103] For the purposes of the present disclosure, “breast cancer” includes, for example, those conditions classified by biopsy or histology as malignant pathology. The clinical delineation of breast cancer diagnoses is well known in the medical arts. One of skill in the art will appreciate that breast cancer refers to any malignancy of the breast tissue, including, for example, carcinomas and sarcomas. Particular embodiments of breast cancer include ductal carcinoma in situ (DCIS), lobular carcinoma in situ (LCIS), or mucinous carcinoma. Breast cancer also refers to infiltrating ductal (IDC) or infiltrating lobular carcinoma (ILC). In most embodiments of the disclosure, the subject of interest is a human patient suspected of or actually diagnosed with

[0104] The article “a” and “an” are used herein to refer to one or more than one (i.e., to at least one) of the grammatical object of the article. By way of example, “an element” means one or more element.

[0105] Throughout the specification the word “comprising,” or variations such as “comprises” or “comprising,” will be understood to imply the inclusion of a stated element, integer or step, or group of elements, integers or steps, but not the exclusion of any other element, integer or step, or group of elements, integers or steps.

### EXAMPLES

### Example 1

### Normal Tissue Risk Test

[0106] FIG. 2 outlines the assay processes associated with the Normal Tissue Risk Test. Following RNA isolation, the test will simultaneously measure the expression levels of a subset of genes in Table 1A or 1B plus housekeeping genes in a single hybridization reaction using an nCounter CodeSet designed specifically to those genes. For example, the housekeeping genes described in U.S. Patent Publication 2008/0032293, which is herein incorporated by reference in its entirety, can be used for normalization. Exemplary housekeeping genes include MRPL19, PSMC4, SF3A1, PUM1, ACTB, GAPD, GUSB, RPLP0, and TFRC. The housekeeping genes are used to normalize the expression of the tumor sample. Each assay run also includes a reference sample consisting of in vitro transcribed RNA's of the 58 targets for normalization purposes.

[0107] FFPE Tissue Review/Procurement and RNA Extraction: The Normal Tissue Risk Test will use RNA extracted from Formalin-fixed, Paraffin-embedded (FFPE) tissue that has been diagnosed as invasive carcinoma of the breast. A Pathologist reviews an H & E stained slide to identify the tissue area containing sufficient tumor tissue content for the test. Unstained slide mounted tissue sections are processed by macro-dissecting the identified tumor area on each slide to remove any adjacent normal tissue. RNA is then isolated from the tumor tissue, and DNA is removed from the sample.

[0108] Assay Setup and Initiation of Hybridization: For each batch of up to 10 RNA samples isolated from a breast tumor, the user will set up a run using the nCounter Analysis x5 system software, which tracks sample processing, reagent lots, and results for each sample. To initiate the assay, the user will pipette the specified amount of RNA into separate tubes within a 12 reaction strip tube and add the CodeSet and hybridization buffer. A reference sample is pipetted into the remaining two tubes with CodeSet and hybridization buffer. The CodeSet consists of probes for each gene that is targeted, additional probes for endogenous “housekeeping” normalization genes and positive and negative controls that are spiked into the assay. The reference sample consists of in vitro transcribed RNA for the targeted genes and housekeeping genes. Once the hybridization reagents are added to the respective tubes, the user transfers the strip tube into a heated-lid heatblock for a specified period of time at a set temperature.

[0109] Purification and Binding on the Prep Station: Upon completing hybridization, the user will transfer the strip tube containing the set of 10 assays and 2 reference samples onto the nCounter Prep Station along with the required prepackaged reagents and disposables. An automated purification process then removes excess capture and reporter probe through two successive hybridization-driven magnetic bead capture steps. The nCounter Prep Station then transfers the purified target/probe complexes into an nCounter cartridge for capture to a glass slide. Following completion of the run, the user removes the cartridge from the Prep Station and seals it with an adhesive film.

[0110] Imaging and Analysis on the Digital Analyzer: The cartridge is then sealed and inserted into the nCounter Digital Analyzer which counts the number of probes captured on the slide for each gene, which corresponds to the amount of target in solution. Automated software will then check thresholds for the housekeeping genes, reference sample, and positive and negative controls to qualify each assay and ensure that the procedure was performed correctly. The signals of each sample are next normalized using the housekeeping genes to control for input sample quality. The signals are then normalized to the reference sample within each run to control for run-to-run variations. The resulting normalized data is entered in the Normal Tissue Risk algorithm to determine a normal tissue risk score.

### Example 2

### Risk of Recurrence (ROR)

[0111] Gene expression profiles from RNA from formalin fixed-paraffin embedded (FFPE) breast tumors from women with early-stage, hormone receptor positive breast cancer were compared (using a Pearson's correlation) to the Normal non-tumor tissue centroid generated from our Algorithm training efforts. The normal tissue centroid was trained on RNA isolated from FFPE breast reduction mammoplasty samples. Very high concordance (R-squared>0.95) was observed when these correlation values (on a −1 to 1 scale) are compared to the ROR scores (on a 0 to 100 scale) that were generated from the same ER+ and Her2− patient samples in two separate patient cohorts (BC noAST and BC-TAM) (FIG. 4 and FIG. 5). Additionally, the slope of these comparisons is close to −50 and a y-intercept at approximately 50. Thus, in two independent ER+ and Her2− patient populations every 0.1 decrease in correlations to our normal centroid translates into a 5 point increase in ROR score. C-index analysis was performed for accuracy on the BC Tam node negative patient data and the results show that the correlation to normal centroid is as accurate as the ROR and Proliferation score (FIG. 6). The ROR score provides a point estimate of risk prediction whether or not women with early-stage, hormone receptor positive breast cancer were likely to have a recurrence in the future. The lower an individual sample's gene expression correlates to the normal centroid (closer to value −1), the higher the estimated risk of recurrence. The higher an individual sample's gene expression correlates to the normal centroid (closer to value +1), the lower the estimated risk of recurrence. With high concordance to the ROR, the correlation to the normal centroid (alone or in combination with other clinical variables) provides a highly effective independent estimate of risk to predict whether or not women with early-stage, hormone receptor positive breast cancer were likely to have a recurrence in the future.

What is claimed is:

1. A method of predicting outcome in a subject having breast cancer comprising:
a) providing a tumor sample from the subject;
b) determining the gene expression profile of the tumor sample wherein the gene expression profile is based on the expression of a subset of the genes listed in Table 1A or 1B;
c) correlating the gene expression profile of the tumor sample to the average gene expression profile (centroid) of a Normal non-tumor subtype; and
d) determining whether the subject has a more favorable outcome or a less favorable outcome based on a correlation value.

2. The method of claim 1, wherein the average gene expression profile (centroid) of a Normal non-tumor subtype is constructed from more than one non-tumor breast tissue sample.

3. The method of claim 2, wherein the non-tumor breast tissue sample is a breast reduction mammoplasty sample.

4. The method of claim 1, wherein a correlation value closer to +1 indicates a lower risk of recurrence and more favorable outcome.

5. The method of claim 1, wherein a correlation value closer to −1 indicates a higher risk of recurrence and less favorable outcome.

6. The method of claim 1, further comprising determining at least one of the following: tumor stage, tumor grade, tumor ploidy, nodal status, estrogen receptor expression, progesterone receptor expression, and HER2/ERBB2 expression.

7. The method of claim 1, further comprising determining each of the following: tumor stage, tumor grade, tumor ploidy, nodal status, estrogen receptor expression, progesterone receptor expression, and HER2/ERBB2 expression.

8. The method of claim 1, wherein the breast cancer is hormone receptor positive.

9. The method of claim 1, wherein the breast cancer is ER positive.

10. The method of claim 1, wherein the breast cancer is HER2 negative.

11. The method of claim 1, wherein the breast cancer is early stage breast cancer.

12. The method of claim 1, wherein the outcome is breast cancer specific survival, cancer recurrence, event-free survival or response to therapy.

13. The method of claim 1, wherein the expression of the subset of genes listed in Table 1A or 1B is determined using the nanoreporter code system (nCounter® Analysis system).

The application's sequence listing, which the Patent Office published only in electronic form, follows.

SEQUENCE LISTING (263 sequences)

SEQ ID NO: 1 - DNA, 1852 bp, Homo sapiens
accgccgagaccgcgtccgccccgcgagcacagagcctcgcctttgccgatccgccgcccgtccacacccgccgccagctcaccatggatgatgatatcgccgcgctcgtcgtcgacaacggctccggcatgtgcaaggccggcttcgcgggcgacgatgccccccgggccgtcttcccctccatcgtggggcgccccaggcaccagggcgtgatggtgggcatgggtcagaaggattcctatgtgggcgacgaggcccagagcaagagaggcatcctcaccctgaagtaccccatcgagcacggcatcgtcaccaactgggacgacatggagaaaatctggcaccacaccttctacaatgagctgcgtgtggctcccgaggagcaccccgtgctgctgaccgaggcccccctgaaccccaaggccaaccgcgagaagatgacccagatcatgtttgagaccttcaacaccccagccatgtacgttgctatccaggctgtgctatccctgtacgcctctggccgtaccactggcatcgtgatggactccggtgacggggtcacccacactgtgcccatctacgaggggtatgccctcccccatgccatcctgcgtctggacctggctggccgggacctgactgactacctcatgaagatcctcaccgagcgcggctacagcttcaccaccacggccgagcgggaaatcgtgcgtgacattaaggagaagctgtgctacgtcgccctggacttcgagcaagagatggccacggctgcttccagctcctccctggagaagagctacgagctgcctgacggccaggtcatcaccattggcaatgagcggttccgctgccctgaggcactcttccagccttccttcctgggcatggagtcctgtggcatccacgaaactaccttcaactccatcatgaagtgtgacgtggacatccgcaaagacctgtacgccaacacagtgctgtctggcggcaccaccatgtaccctggcattgccgacaggatgcagaaggagatcactgccctggcacccagcacaatgaagatcaagatcattgctcctcctgagcgcaagtactccgtgtggatcggcggctccatcctggcctcgctgtccaccttccagcagatgtggatcagcaagcaggagtatgacgagtccggcccctccatcgtccaccgcaaatgcttctaggcggactatgacttagttgcgttacaccctttcttgacaaaacctaacttgcgcagaaaacaagatgagattggcatggctttatttgttttttttgttttgttttggttttttttttttttttggcttgactcaggatttaaaaactggaacggtgaaggtgacagcagtcggttggagcgagcatcccccaaagttcacaatgtggccgaggactttgattgcacattgttgtttttttaatagtcattccaaatatgagatgcgttgttacaggaagtcccttgccatcctaaaagccaccccacttctctctaaggagaatggcccagtcctctcccaagtccacacaggggaggtgatagcattgctttcgtgtaaattatgtaatgcaaaatttttttaatcttcgccttaatacttttttattttgttttattttgaatgatgagccttcgtgcccccccttcccccttttttgtcccccaacttgagatgtatgaaggcttttggtctccctgggagtgggtggaggcagccagggcttacctgtacactgacttgagaccagttgaataaaagtgcacaccttaaaaatgaaaaaaaaaaaaaaaaaaaaaaaaaaaaaaaaaaaaaaaaa

SEQ ID NO: 2 - DNA, 1401 bp, Homo sapiens
ggctgggactggctgagcctggcgggaggcggggtccgagtcaccgcctgccgccgcgcccccggtttctataaattgagcccgcagcctcccgcttcgctctctgctcctcctgttcgacagtcagccgcatcttcttttgcgtcgccagccgagccacatcgctcagacaccatggggaaggtgaaggtcggagtcaacggatttggtcgtattgggcgcctggtcaccagggctgcttttaactctggtaaagtggatattgttgccatcaatgaccccttcattgacctcaactacatggtttacatgttccaatatgattccacccatggcaaattccatggcaccgtcaaggctgagaacgggaagcttgtcatcaatggaaatcccatcaccatcttccaggagcgagatccctccaaaatcaagtggggcgatgctggcgctgagtacgtcgtggagtccactggcgtcttcaccaccatggagaaggctggggctcatttgcaggggggagccaaaagggtcatcatctctgccccctctgctgatgcccccatgttcgtcatgggtgtgaaccatgagaagtatgacaacagcctcaagatcatcagcaatgcctcctgcaccaccaactgcttagcacccctggccaaggtcatccatgacaactttggtatcgtggaaggactcatgaccacagtccatgccatcactgccacccagaagactgtggatggcccctccgggaaactgtggcgtgatggccgcggggctctccagaacatcatccctgcctctactggcgctgccaaggctgtgggcaaggtcatccctgagctgaacgggaagctcactggcatggccttccgtgtccccactgccaacgtgtcagtggtggacctgacctgccgtctagaaaaacctgccaaatatgatgacatcaagaaggtggtgaagcaggcgtcggagggccccctcaagggcatcctgggctacactgagcaccaggtggtctcctctgacttcaacagcgacacccactcctccacctttgacgctggggctggcattgccctcaacgaccactttgtcaagctcatttcctggtatgacaacgaatttggctacagcaacagggtggtggacctcatggcccacatggcctccaaggagtaagacccctggaccaccagccccagcaagagcacaagaggaagagagagaccctcactgctggggagtccctgccacactcagtcccccaccacactgaatctcccctcctcacagttgccatgtagaccccttgaagaggggaggggcctagggagccgcaccttgtcatgtaccatcaataaagtaccctgtgctcaaccaaaaaaaaaaaaaaaaaaa

SEQ ID NO: 3 - DNA, 2321 bp, Homo sapiens
gtcctcaaccaagatggcgcggatggcttcaggcgcatcacgacaccggcgcgtcacgcgacccgccctacgggcacctcccgcgcttttcttagcgccgcagacggtggccgagcgggggaccgggaagcatggcccgggggtcggcggttgcctgggcggcgctcgggccgttgttgtggggctgcgcgctggggctgcagggcgggatgctgtacccccaggagagcccgtcgcgggagtgcaaggagctggacggcctctggagcttccgcgccgacttctctgacaaccgacgccggggcttcgaggagcagtggtaccggcggccgctgtgggagtcaggccccaccgtggacatgccagttccctccagcttcaatgacatcagccaggactggcgtctgcggcattttgtcggctgggtgtggtacgaacgggaggtgatcctgccggagcgatggacccaggacctgcgcacaagagtggtgctgaggattggcagtgcccattcctatgccatcgtgtgggtgaatggggtcgacacgctagagcatgaggggggctacctccccttcgaggccgacatcagcaacctggtccaggtggggcccctgccctcccggctccgaatcactatcgccatcaacaacacactcacccccaccaccctgccaccagggaccatccaatacctgactgacacctccaagtatcccaagggttactttgtccagaacacatattttgactttttcaactacgctggactgcagcggtctgtacttctgtacacgacacccaccacctacatcgatgacatcaccgtcaccaccagcgtggagcaagacagtgggctggtgaattaccagatctctgtcaagggcagtaacctgttcaagttggaagtgcgtcttttggatgcagaaaacaaagtcgtggcgaatgggactgggacccagggccaacttaaggtgccaggtgtcagcctctggtggccgtacctgatgcacgaacgccctgcctatctgtattcattggaggtgcagctgactgcacagacgtcactggggcctgtgtctgacttctacacactccctgtggggatccgcactgtggctgtcaccaagagccagttcctcatcaatgggaaacctttctatttccacggtgtcaacaagcatgaggatgcggacatccgagggaagggcttcgactggccgctgctggtgaaggacttcaacctgcttcgctggcttggtgccaacgctttccgtaccagccactacccctatgcagaggaagtgatgcagatgtgtgaccgctatgggattgtggtcatcgatgagtgtcccggcgtgggcctggcgctgccgcagttcttcaacaacgtttctctgcatcaccacatgcaggtgatggaagaagtggtgcgtagggacaagaaccaccccgcggtcgtgatgtggtctgtggccaacgagcctgcgtcccacctagaatctgctggctactacttgaagatggtgatcgctcacaccaaatccttggacccctcccggcctgtgacctttgtgagcaactctaactatgcagcagacaagggggctccgtatgtggatgtgatctgtttgaacagctactactcttggtatcacgactacgggcacctggagttgattcagctgcagctggccacccagtttgagaactggtataagaagtatcagaagcccattattcagagcgagtatggagcagaaacgattgcagggtttcaccaggatccacctctgatgttcactgaagagtaccagaaaagtctgctagagcagtaccatctgggtctggatcaaaaacgcagaaaatacgtggttggagagctcatttggaattttgccgatttcatgactgaacagtcaccgacgagagtgctggggaataaaaaggggatcttcactcggcagagacaaccaaaaagtgcagcgttccttttgcgagagagatactggaagattgccaatgaaaccaggtatccccactcagtagccaagtcacaatgtttggaaaacagcctgtttacttgagcaagactgataccacctgcgtgtcccttcctccccgagtcagggcgacttccacagcagcagaacaagtgcctcctggactgttcacggcagaccagaacgtttctggcctgggttttgtggtcatctattctagcagggaacactaaaggtggaaataaaagattttctattatggaaataaagagttggcatgaaagtggctactgaaaaaaaaaaaaaaaaaaaaaaaaa

SEQ ID NO: 4 - DNA, 1229 bp, Homo sapiens
gtctgacgggcgatggcgcagccaatagacaggagcgctatccgcggtttctgattggctactttgttcgcattataaaaggcacgcgcgggcgcgaggcccttctctcgccaggcgtcctcgtggaagtgacatcgtctttaaaccctgcgtggcaatccctgacgcaccgccgtgatgcccagggaagacagggcgacctggaagtccaactacttccttaagatcatccaactattggatgattatccgaaatgtttcattgtgggagcagacaatgtgggctccaagcagatgcagcagatccgcatgtcccttcgcgggaaggctgtggtgctgatgggcaagaacaccatgatgcgcaaggccatccgagggcacctggaaaacaacccagctctggagaaactgctgcctcatatccgggggaatgtgggctttgtgttcaccaaggaggacctcactgagatcagggacatgttgctggccaataaggtgccagctgctgcccgtgctggtgccattgccccatgtgaagtcactgtgccagcccagaacactggtctcgggcccgagaagacctcctttttccaggctttaggtatcaccactaaaatctccaggggcaccattgaaatcctgagtgatgtgcagctgatcaagactggagacaaagtgggagccagcgaagccacgctgctgaacatgctcaacatctcccccttctcctttgggctggtcatccagcaggtgttcgacaatggcagcatctacaaccctgaagtgcttgatatcacagaggaaactctgcattctcgcttcctggagggtgtccgcaatgttgccagtgtctgtctgcagattggctacccaactgttgcatcagtaccccattctatcatcaacgggtacaaacgagtcctggccttgtctgtggagacggattacaccttcccacttgctgaaaaggtcaaggccttcttggctgatccatctgcctttgtggctgctgcccctgtggctgctgccaccacagctgctcctgctgctgctgcagccccagctaaggttgaagccaaggaagagtcggaggagtcggacgaggatatgggatttggtctctttgactaatcaccaaaaagcaaccaacttagccagttttatttgcaaaacaaggaaataaaggcttacttctttaaaaagtaaaaaaaaaaaaaaaaaaaaaaaaa

SEQ ID NO: 5 - DNA, 5241 bp, Homo sapiens
agagcgtcgggatatcgggtggcggctcgggacggaggacgcgctagtgtgagtgcgggcttctagaactacaccgaccctcgtgtcctcccttcatcctgcggggctggctggagcggccgctccggtgctgtccagcagccatagggagccgcacggggagcgggaaagcggtcgcggccccaggcggggcggccgggatggagcggggccgcgagcctgtggggaaggggctgtggcggcgcctcgagcggctgcaggttcttctgtgtggcagttcagaatgatggatcaagctagatcagcattctctaacttgtttggtggagaaccattgtcatatacccggttcagcctggctcggcaagtagatggcgataacagtcatgtggagatgaaacttgctgtagatgaagaagaaaatgctgacaataacacaaaggccaatgtcacaaaaccaaaaaggtgtagtggaagtatctgctatgggactattgctgtgatcgtctttttcttgattggatttatgattggctacttgggctattgtaaaggggtagaaccaaaaactgagtgtgagagactggcaggaaccgagtctccagtgagggaggagccaggagaggacttccctgcagcacgtcgcttatattgggatgacctgaagagaaagttgtcggagaaactggacagcacagacttcaccggcaccatcaagctgctgaatgaaaattcatatgtccctcgtgaggctggatctcaaaaagatgaaaatcttgcgttgtatgttgaaaatcaatttcgtgaatttaaactcagcaaagtctggcgtgatcaacattttgttaagattcaggtcaaagacagcgctcaaaactcggtgatcatagttgataagaacggtagacttgtttacctggtggagaatcctgggggttatgtggcgtatagtaaggctgcaacagttactggtaaactggtccatgctaattttggtactaaaaaagattttgaggatttatacactcctgtgaatggatctatagtgattgtcagagcagggaaaatcacctttgcagaaaaggttgcaaatgctgaaagcttaaatgcaattggtgtgttgatatacatggaccagactaaatttcccattgttaacgcagaactttcattctttggacatgctcatctggggacaggtgacccttacacacctggattcccttccttcaatcacactcagtttccaccatctcggtcatcaggattgcctaatatacctgtccagacaatctccagagctgctgcagaaaagctgtttgggaatatggaaggagactgtccctctgactggaaaacagactctacatgtaggatggtaacctcagaaagcaagaatgtgaagctcactgtgagcaatgtgctgaaagagataaaaattcttaacatctttggagttattaaaggctttgtagaaccagatcactatgttgtagttggggcccagagagatgcatggggccctggagctgcaaaatccggtgtaggcacagctctcctattgaaacttgcccagatgttctcagatatggtcttaaaagatgggtttcagcccagcagaagcattatctttgccagttggagtgctggagactttggatcggttggtgccactgaatggctagagggatacctttcgtccctgcatttaaaggctttcacttatattaatctggataaagcggttcttggtaccagcaacttcaaggtttctgccagcccactgttgtatacgcttattgagaaaacaatgcaaaatgtgaagcatccggttactgggcaatttctatatcaggacagcaactgggccagcaaagttgagaaactcactttagacaatgctgctttccctttccttgcatattctggaatcccagcagtttctttctgtttttgcgaggacacagattatccttatttgggtaccaccatggacacctataaggaactgattgagaggattcctgagttgaacaaagtggcacgagcagctgcagaggtcgctggtcagttcgtgattaaactaacccatgatgttgaattgaacctggactatgagaggtacaacagccaactgctttcatttgtgagggatctgaaccaatacagagcagacataaaggaaatgggcctgagtttacagtggctgtattctgctcgtggagacttcttccgtgctacttccagactaacaacagatttcgggaatgctgagaaaacagacagatttgtcatgaagaaactcaatgatcgtgtcatgagagtggagtatcacttcctctctccctacgtatctccaaaagagtctcctttccgacatgtcttctggggctccggctctcacacgctgccagctttactggagaacttgaaactgcgtaaacaaaataacggtgcttttaatgaaacgctgttcagaaaccagttggctctagctacttggactattcagggagctgcaaatgccctctctggtgacgtttgggacattgacaatgagttttaaatgtgatacccatagcttccatgagaacagcagggtagtctggtttctagacttgtgctgatcgtgctaaattttcagtagggctacaaaacctgatgttaaaattccatcccatcatcttggtactactagatgtctttaggcagcagcttttaatacagggtagataacctgtacttcaagttaaagtgaataaccacttaaaaaatgtccatgatggaatattcccctatctctagaattttaagtgctttgtaatgggaactgcctctttcctgttgttgttaatgaaaatgtcagaaaccagttatgtgaatgatctctctgaatcctaagggctggtctctgctgaaggttgtaagtggtcgcttactttgagtgatcctccaacttcatttgatgctaaataggagataccaggttgaaagaccttctccaaatgagatctaagcctttccataaggaatgtagctggtttcctcattcctgaaagaaacagttaactttcagaagagatgggcttgttttcttgccaatgaggtctgaaatggaggtccttctgctggataaaatgaggttcaactgttgattgcaggaataaggccttaatatgttaacctcagtgtcatttatgaaaagaggggaccagaagccaaagacttagtatattttcttttcctctgtcccttcccccataagcctccatttagttctttgttatttttgtttcttccaaagcacattgaaagagaaccagtttcaggtgtttagttgcagactcagtttgtcagactttaaagaataatatgctgccaaattttggccaaagtgttaatcttaggggagagctttctgtccttttggcactgagatatttattgtttatttatcagtgacagagttcactataaatggtgtttttttaatagaatataattatcggaagcagtgccttccataattatgacagttatactgtcggttttttttaaataaaagcagcatctgctaataaaacccaacagatactggaagttttgcatttatggtcaacacttaagggttttagaaaacagccgtcagccaaatgtaattgaataaagttgaagctaagatttagagatgaattaaatttaattaggggttgctaagaagcgagcactgaccagataagaatgctggttttcctaaatgcagtgaattgtgaccaagttataaatcaatgtcacttaaaggctgtggtagtactcctgcaaaattttatagctcagtttatccaaggtgtaactctaattcccattttgcaaaatttccagtacctttgtcacaatcctaacacattatcgggagcagtgtcttccataatgtataaagaacaaggtagtttttacctaccacagtgtctgtatcggagacagtgatctccatatgttacactaagggtgtaagtaattatcgggaacagtgtttcccataattttcttcatgcaatgacatcttcaaagcttgaagatcgttagtatctaacatgtatcccaactcctataattccctatcttttagttttagttgcagaaacattttgtggtcattaagcattgggtgggtaaattcaaccactgtaaaatgaaattactacaaaatttgaaatttagcttgggtttttgttacctttatggtttctccaggtcctctacttaatgagatagtagcatacatttataatgtttgctattgacaagtcattttaactttatcacattatttgcatgttacctcctataaacttagtgcggacaagttttaatccagaattgaccttttgacttaaagcagagggactttgtatagaaggtttgggggctgtggggaaggagagtcccctgaaggtctgacacgtctgcctacccattcgtggtgatcaattaaatgtaggtatgaataagttcgaagctccgtgagtgaaccatcattataaacgtgatgatcagctgtttgtcatagggcagttggaaacggcctcctagggaaaagttcatagggtctcttcaggttcttagtgtcacttacctagatttacagcctcacttgaatgtgtcactactcacagtctctttaatcttcagttttatctttaatctcctcttttatcttggactgacatttagcgtagctaagtgaaaaggtcatagctgagattcctggttcgggtgttacgcacacgtacttaaatgaaagcatgtggcatgttcatcgtataacacaatatgaatacagggcatgcattttgcagcagtgagtctcttcagaaaacccttttctacagttagggttgagttacttcctatcaagccagtacgtgctaacaggctcaatattcctgaatgaaatatcagactagtgacaagctcctggtcttgagatgtcttctcgttaaggagatgggccttttggaggtaaaggataaaatgaatgagttctgtcatgattcactattctagaacttgcatgacctttactgtgttagctctttgaatgttcttgaaattttagactttctttgtaaacaaatgatatgtccttatcattgtataaaagctgttatgtgcaacagtgtggagattccttgtctgatttaataaaatacttaaacactgaaaaaaaaaaaaaaaaaa

SEQ ID NO: 6 - DNA, 7827 bp, Homo sapiens
gtagtcttgacgtgagctagctggcatggcggcctgcattgcagcggggcactgggctgcaatgggcctaggccggagtttccaagccgccaggactctgctccccccgccggcctctatcgcctgcagggtccacgcggggcctgtccggcagcagagcactgggccttccgagcccggtgcgttccaaccgccgccgaaaccggtcatcgtggacaagcaccgccccgtggaaccggaacgcaggttcttgagtcctgaattcattcctcgaaggggaagaacagatcctctgaaatttcaaatagaaagaaaagatatgttagaaaggagaaaagtactccacattccagagttctatgttggaagtattcttcgtgttactacagctgacccatatgccagtggaaaaatcagccagtttctggggatttgcattcagagatcaggaagaggacttggagctactttcatccttaggaatgttatcgaaggacaaggtgtcgagatttgctttgaactttataatcctcgggtccaggagattcaggtggtcaaattagagaaacggctggatgatagcttgctatacttacgagatgcccttcctgaatatagcacttttgatgtgaatatgaagccagtagtacaagagcctaaccaaaaagttcctgttaatgagctgaaagtaaaaatgaagcctaagccctggtctaaacgctgggaacgtccaaattttaatattaaaggaatcagatttgatctttgtttaactgaacagcaaatgaaagaagctcagaagtggaatcagccatggcttgaatttgatatgatgagggaatatgatacttcaaaaattgaagctgcaatatggaaggaaattgaagcgtcgaaaaggtcttgattctgagaatgaatttggttagttgcagaagatacattggctctaagaggatatattttgagaccaatttaatttcatttataagaacatagtaattaagtgaactaagcattcattgttttattaatactttttttctaaaataaaacttgtacaccagtttattactctaaaaagagaattacacatgccaaatggaccaatgtccatttgcttattggaggcaaagctacaatagaagtcagagcatcaccagaatggtctttaatgagcatggaacctgagcaaagggaataggtgggatgaattttttttttaattgtgaaacaattcataagcacaatatgatttacagaataataaacattcatgtacccactatcaggttaagaaatagaacatttattaatatgtaggaatgttaagaaataaaacatttaataagatctcagaagactccagtaaatctgcaattgtatctctctcctttttaaatgtaaatatcatcttgacttgttaattattcccttgcatttcttttagtttactgccaacacatatattcttcaacaatatatttaattttgaaaaacctgaaaaaaaaaacctgttagcaagtataaaggggcagtattactattattgcatgaaggcttcaagggaaacgttacagtctttgggtcatagtctggcttcagcttcctctgagagtttacagaggccaattttgagcaaattcatggctaaggttatgagtgagttctgctaaacagaaggctcaccacaaggtatctggcaggattatactgggtagctggatgttgcagaaatgtggttagaggaagtaaactgttttttgatgctcacagcatgatgaatcaaactctgtatcttaggattaggttaaaacaatacctttggtatgatatgagtgttgttgctgatccatgcagcatggattggaaagctggggtataagcacacatgctaaagaaaaacatgtaatttggtccatactcacctggatatactgttcctcaggttaaaaaatacagtactatcctaaatcttgaaggcaactctcagcctatccattgagttaccttcagatctgccctctggttcctagctgtcttgggactaacttctttcctgcgctcagctgttttctggattccatgttttccattttattgagtactaacttgttttgctgcagcacatcctttggtagcttctagaggaagtttgtgtggaggtaaaatttttgagaccttgcatgtctcatgtttgattgatactttatacgtttaggtaggaggtaattttccttcaggactttaaaaatattgttgctccattttctttgtttctattgttgtattgagaaatccaatgccattttgatttccccatcataaatttcatgatgatgtgtcttggtgtgggtctatatttatccattgtattgggttttaggtgaacccttccagatagtaactcatttctgtcagttctgggaaacacttagcattggttgatgatttattctctgctgctttgttctcccaactattatttggatgttggatatccagcactgggtatctattttcttacctccctcccttgaccccagtctctgttttttagctctttagctcaatcttccaactctttgctattgtattttaaaatcttaagaccccttcttgatttgtagaagttccttttcttacaaccaaaaagcctttatctatggatttgttcacagataaggggtattcaatatagtgtatttttttttcatttaaaattgtttgcgcatctatttcctccaaatttctttctgtatttattttttgttgtctatatttcagacttttccaggatatctgataatctttggctgtcttcttatggttgaaagagggactaaaaagcttggaaagcctttgggttgtgggaaggggctgtctttaggattatctgaatgggcttttttgggagtcccctcctccacatgaatattttggttttgtcagattccctagaatagaggcttccaatctccttcctggaggggtctgtccaggaaggagattgtctaggggtctgtcagacagcagctttcagctacttccttgatctttttcactaatgattatatagtcatctaactactgtcaacaagtaatagatatcctatccttcacttgtttagattatttgctgagataacctctcaaaagaacctctcaaaataaaaggttaacaagagcctatatcttatatttttcttctctttatcttgttagaagatagctattaaaacctgttctttttctgtcttgataaacacacttcaatcttggtagaatggtagatgggacagtatattttaggacctaaagctctgcaaatgtatgatcagcttgtaagtacaggtgctcaaaaacatgtaaacaatcatgctttttactctgtaggaatatctttaaaattcttgtgaatttttccccagaagtaaagcaaatcttcccccagaaataaaattaaatgtgcataatctaaagctttttttttttattgtggtaggatatatatataaaacataatttgccattgtaaacattttaaatttacaagtcagaggcattaattacatcacaatgttgtgaaattattactactatttccaaaattttctcatcaccccaaactgaaactctgtaactgttgagcaataacctcattcctgtatctctcccaaccccaggtaacctcaaatctttctttttatctttgagacaaggtctcattctatcactcaggtaggagtgcagtggtgtgatcatagctcattgcagcctcaaaatcctgggctcaagcaatcctccttgagtagctaagactataggcacacattaactgcgcctggctgattttgttttttgtagagatgtggtcttgctatgtttcccatgctggtcttgagttcctggcctcaagcagtccttaagattcatccatgttgtggcatgtgtcagaatttcatttgtttttatgactaaataatattccattgtatgtatatacattttgttcatccatcttctgatgaacactgggatatgtctaccttttggctattgtgaataatgctgcagtaaacattgacataacaagtatgtatttgattgcctgtttctaagttcttttgggtatacatcttgagtagaattgctagataatgtcatgttttatttctcttgtgatttcttcttcgatcccctggttgagtgtgttaatttctacatgtttatgaatttcccactgtttttttgttattgatttccaagttcattccattgtgattagagaagatacttagtatgattttaatgtttttgagaattggtgtgtggcctgatagatggtctgtcctggagaatgttcctcatacacttgagcaaaatatttatcatgctattgttgactgtagttttctatatgtctcttaggtcaaggtggtttacaatgtgttaaggttctctttttttaaaaaaatttttgcacagagtatctttttctatgtgttccatgtatttgtgtctttggagctatagtctcttgtagacagcatatcactatcttgttttgttttgttttttctgtccattctgccaatttctgccttttgattggaaaatttaatccatttgcatttaaagtaattaaggaaggactttcttctaccatttaacacttcttctatatgtcatatacttttttggcccctcatttcctctttatggccttcttttctgtttttttgtagtgaactagtctgattctctttccactcccctttgtgtatatttgttagatgttttatttgtggttgctatggggattatagttaacatcctacacttaaaacaatctaatttaaactgataccaatttaccttcaatagcatacaaaatctctactcctgtaaagctctgcccctgccccccttatgttattgatggcacaaattgcctaataaataatttatagttatttgtatgagtttgtcttttaaatcatttaggaaataaaaagtggagttagaaaacagtatgatagtaatactgacttttatatttgtcaatatatttatcttattttggatccttatttcattatatagatttgagttactgtctagtgcccttccatttcggcccaaaggattcccttatgcatttcttgcagggcaagtctaattgtaataaactccctcagcttttgttttatctgagaatgtcttgatttctcccttatttttgatggataattttgccagatacatgaatttttggtaacagtatttttctttcagcactttaaatatgtcatcccactaccttctgacttcatggtttctcatgagatattagatgttataaaatttgaggattcctcattcttgatgagtcagttctgtcttattgcttttcggatttgctcagcttttgtcttttgacagtttgattataacgcggctcagtgtgggtctctgagtttatcccacttagagtttgttgagtttcttggagtcatagatttatgtcttttatcaaattttggacatatttggctattatttcttcaatttttttcactgcttctttcttttccttctgaaatattcttaatgtatatgttggtctgtttgatgctgtctcaccagtttcttaggctgtgttctcttttgttcctcagacttgattattgcagttgcccttctttttatttttttcaagtttgttgattcttctccctgttcagatcaactgttgaactcctctagtgaatttatttcagttactgtacttttcagctccaagatttatctttggttcctttttataacgtctgtgtctttattgatattctcattttgttcatatgtctctttcttcctttagttctttgtccatgttttcctttagctctttgggcttatttaagacaattgtttaaagtctttgcatagtaagtccaatgtctgtgtttcttcagggatggttttcattattttgttttcaatgagccatactttcctgtgtctttgtatgctgtctttttgttgttgaaaactgtatgtttgaacatcataacgtggtggccctgaaaatcagatattccccccttcctgagagttagttttatttttattattgaagattgtagcagtctattgctacatgtgcagtcatttccaaactatttttgcaaagactgtattccttctgtgtgtcatcactgaagtctctgttccttagtttgtgtttaatagtttgacatagatttccttgaaaggagttaaaactagcagaaaaatctctctcccagtctttccagtctttgtagattggttctgtgctgggcttttccattaatacttagccaggcttgtactgagcctaacaatcaggcccaaaagcgtagggtctttgcagatcttgtctgagcatgcttcttgctgtgtatgcacgtagttttctaaatctccctgtatgtgctgttgaatattctaatttcccaaagaaactcctttgcagctttttctcacagaacatagatggttttttggatatcttgaccatagtctttcgacccaggtgtttgcggttgttagttcaccttacacttttttcaagcattgcctactgcttacgatgagtgctctgtcaatcctttaagtagccccagacaggctaccagagacttaaacaagaatttgtaagttctgctcagcttcctctagaaatggggatcagggtccaagacagaatgcagttgctgatttcaagactgctgcaacaccagggagcttgtgggggaagggcaagcagaaatgtcacaaagctttcttgccattttaaagttgcctgttcttgactcagcatttgcttcattgctataaactttttactgtttttcagagttctgataaaattggctatgcctgttcctgctttaaaaaatatatatatattttttagggattggggtctcactatactgaccaggctggtcttgaacttctggcctcaagccatcctctcatttcagcttcccaaagtgctgcaattacacgcgtgaaccaccacacccagcccctgcttgtttttcaatgtgcctactccaccatgttgctcaagtatgtatattttctaaactaccttgtagtgttgtgatgggaaataaatccctgagccttttgaataactcagagagatcaaaaacttagtttatcctattcgaaggattagaaaaatgatatatctttcactttttcagggataggctcctcattagaaggctcctatgtgccgatgctgtacaagacatttcatttctcttaatgtttacaacaagcttgttgccaaggctgatcttgaactcctggcctcaaacgatcctcccagctcagtctcacaaagtgttgggatgtctggccaactaatgactatcttaactcttgtgtttcaatgtttatgccttcttttatcttgactgattgtatgactatgtcttctagaacaatgttgaacagaaatggtgagagcagacatccttgctttaatatttcaccattatatatgatgttaggtatagatttttctcacagatgccttttatcagattgaggaatttatattcctactttgccgaaaggtttttgtagtatgagggggtgctgaattttgtcaaacactttttcggtaataattgagatgattggttctgcagtcatcgagatgtggattttctcctttattctgttcgtgagtgattacactggttgactaatgttaaaacaaccttactttccaggaataaaccctattatcttttttataca

SEQ ID NO: 7 - DNA, 1914 bp, Homo sapiens
tgcgggtacggacagcgcatgagcttatgttgagggcggagcccagaccagcccttcgtcctatcctgcccttccagcacctctcagccgtaacttaaactacacttcccagaagcctcctcagccagggacttccgttgtcgtcagcggaagcggtgacagatcatcccaggccacacagaggccggcttggtcactatggaggagataggcatcttggtggagaaggctcaggatgagatcccagcactgtccgtgtcccggccccagaccggcctgtccttcctgggccctgagcctgaggacctggaggacctgtacagccgctacaagaagctgcagcaagagctggagttcctggaggtgcaggaggaatacatcaaagatgagcaaaagaacctgaaaaaggaatttctccatgcccaggaggaggtgaagcgaatccaaagcatcccgctggtcatcggacaatttctggaggctgtggatcagaatacagccatcgtgggctctaccacaggctccaactattatgtgcgcatcctgagcaccatcgatcgggagctgctcaagcccaacgcctcagtggccctccacaagcacagcaatgcactggtggacgtgctgccccccgaagccgacagcagcatcatgatgctcacctcagaccagaagccagatgtgatgtacgcggacatcggaggcatggacatccagaagcaggaggtgcgggaggccgtggagctcccgctcacgcatttcgagctctacaagcagatcggcatcgatcccccccgaggcgtcctcatgtatggcccacctggctgtgggaagaccatgttggcaaaggcggtggcacatcacacaacagctgcattcatccgggtcgtgggctcggagtttgtacagaagtatctgggtgagggcccccgcatggtccgggatgtgttccgcctggccaaggagaatgcacctgccatcatcttcatagacgagattgatgccatcgccaccaagagattcgatgctcagacaggggccgacagggaggttcagaggatcctgctggagctgctgaatcagatggatggatttgatcagaatgtcaatgtcaaggtaatcatggccacaaacagagcagacaccctggatccggccctgctacggccaggacggctggaccgtaaaattgaatttccacttcctgaccgccgccagaagagattgattttctccactatcactagcaagatgaacctctctgaggaggttgacttggaagactatgtggcccggccagataagatttcaggagctgatattaactccatctgtcaggagagtggaatgttggctgtccgtgaaaaccgctacattgtcctggccaaggacttcgagaaagcatacaagactgtcatcaagaaggacgagcaggagcatgagttttacaagtgacccttcccttccctccaccacaccactcaggggctggggcttctctcgcacccccagcacctctgtcccaaaacctcattcccttttttctttacccaggattggtttcttcaataaatagataagatcgaatccatttaatttcttcttagaagtttaactcctttggagaatgtgggccttgaataggatcctctgggtccctcttaatctgacagatgagcagacgaggtgcatggcctgggttgcagcttgagagaaccaaaatattcaaaccagatgacttccaaaatgtggggaaagggatggaaaatgaacctgagatggagtccttaatcacgggataaagccctgtgcatctccctcatttcctacaggtaaaagacagtaaagaaattcaggtcacaggccttgggagttcataggaaggagatgtccagtgctgtccagtagaacttt

SEQ ID NO: 8 - DNA, 5416 bp, Homo sapiens
agtgggccgccatgttgtcggagtgaaaggtaagggggagcgagagcgccagagagagaagatcggggggctgaaatccatcttcatcctaccgctccgcccgtgttggtggaatgagcgttgcatgtgtcttgaagagaaaagcagtgctttggcaggactctttcagcccccacctgaaacatcaccctcaagaaccagctaatcccaacatgcctgttgttttgacatctggaacagggtcgcaagcgcagccacaaccagctgcaaatcaggctcttgcagctgggactcactccagccctgtcccaggatctataggagttgcaggccgttcccaggacgacgctatggtggactacttctttcagaggcagcatggtgagcagcttgggggaggaggaagtggaggaggcggctataataatagcaaacatcgatggcctactggggataacattcatgcagaacatcaggtgcgttccatggatgaactgaatcatgattttcaagcacttgctctggagggaagagcgatgggagagcagctcttgccaggtaaaaagttttgggaaacagatgaatccagcaaagatggaccaaaaggaatattcctgggtgatcaatggcgagacagtgcctggggaacatcagatcattcagtttcccagccaatcatggtgcagagaagacctggtcagagtttccatgtgaacagtgaggtcaattctgtactgtccccacgatcggagagtgggggactaggcgttagcatggtggagtatgtgttgagctcatccccgggcgattcctgtctaagaaaaggaggatttggcccaagggatgcagacagtgatgaaaacgacaaaggtgaaaagaagaacaagggtacgtttgatggagataagctaggagatttgaaggaggagggtgatgtgatggacaagaccaatggtttaccagtgcagaatgggattgatgcagacgtcaaagattttagccgtacccctggtaattgccagaactctgctaatgaagtggatcttctgggtccaaaccagaatggttctgagggcttagcccagctgaccagcaccaatggtgccaagcctgtggaggatttctccaacatggagtcccagagtgtccccttggaccccatggaacatgtgggcatggagcctcttcagtttgattattcaggcacgcaggtacctgtggactcagcagcagcaactgtgggactttttgactacaattctcaacaacagctgttccaaagacctaatgcgcttgctgtccagcagttgacagctgctcagcagcagcagtatgcactggcagctgctcatcagccgcacatcggtttagctcccgctgcgtttgtccccaatccatacatcatcagcgctgctcccccagggacggacccctacacagctggattggctgcagcagcgacactaggcccagctgtggtccctcaccagtattatggagttactccctggggagtctaccctgccagtcttttccagcagcaagctgccgctgccgctgcagcaactaattcagctaatcaacagaccaccccacaggctcagcaaggacagcagcaggttctccgtggaggagccagccaacgtcctttgaccccaaaccagaaccagcagggacagcaaacggatccccttgtggcagctgcagcagtgaattctgcccttgcatttggacaaggtctggcagcaggcatgccaggttatccggtgttggctcctgctgcttactatgaccaaactggtgcccttgtagtgaatgcaggcgcgagaaatggtcttggagctcctgttcgacttgtagctcctgccccagtcatcattagttcctcagctgcacaagcagctgttgcagcagccgcagcttcagcaaatggagcagctggtggtcttgctggaacaacaaatggaccatttcgccctttaggaacacagcagcctcagccccagccccagcagcagcccaataacaacctggcatccagttctttctacggcaacaactctctgaacagcaattcacagagcagctccctcttctcccagggctctgcccagcctgccaacacatccttgggattcggaagtagcagttctctcggcgccaccctgggatccgcccttggagggtttggaacagcagttgcaaactccaacactggcagtggctcccgccgtgactccctgactggcagcagtgacctttataagaggacatcgagcagcttgacccccattggacacagtttttataacggccttagcttttcctcctctcctggacccgtgggcatgcctctccctagtcagggaccaggacattcacagacaccacctccttccctctcttcacatggatcctcttcaagcttaaacctgggaggactcacgaatggcagtggaagatacatctctgctgctccaggcgctgaagccaagtaccgcagtgcaagcagcgcctccagcctcttcagcccgagcagcactcttttctcttcctctcgtttgcgatatggaatgtctgatgtcatgccttctggcaggagcaggcttttggaagattttcgaaacaaccggtaccccaatttacaactgcgggagattgctggacatataatggaattttcccaagaccagcatgggtccagattcattcagctgaaactggagcgtgccacaccagctgagcgccagcttgtcttcaatgaaatcctccaggctgcctaccaactcatggtggatgtgtttggtaattacgtcattcagaagttctttgaatttggcagtcttgaacagaagctggctttggcagaacggattcgaggccacgtcctgtcattggcactacagatgtatggctgccgtgttatccagaaagctcttgagtttattccttcagaccagcaggtaattaatgagatggttcgggaactagatggccatgtcttgaagtgtgtgaaagatcagaatggcaatcacgtggttcagaaatgcattgaatgtgtacagccccagtctttgcaatttatcatcgatgcgtttaagggacaggtatttgccttatccacacatccttatggctgccgagtgattcagagaatcctggagcactgtctccctgaccagacactccctattttagaggagcttcaccagcacacagagcagcttgtacaggatcaatatggaaattatgtaatccaacatgtactggagcacggtcgtcctgaggataaaagcaaaattgtagcagaaatccgaggcaatgtacttgtattgagtcagcacaaatttgcaagcaatgttgtggagaagtgtgttactcacgcctcacgtacggagcgcgctgtgctcatcgatgaggtgtgcaccatgaacgacggtccccacagtgccttatacaccatgatgaaggaccagtatgccaactacgtggtccagaagatgattgacgtggcggagccaggccagcggaagatcgtcatgcataagatccggccccacatcgcaactcttcgtaagtacacctatggcaagcacattctggccaagctggagaagtactacatgaagaacggtgttgacttagggcccatctgtggcccccctaatggtatcatctgaggcagtgtcacccgctgttccctcattcccgctgacctcactggcccactggcaaatccaaccagcaaccagaaatgttctagtgtagagtctgagacgggcaagtggttgctccaggattactccctcctccaaaaaaggaatcaaatccacgagtggaaaagcctttgtaaatttaattttattacacataacatgtactattttttttaattgactaattgccctgctgttttactggtgtataggatacttgtacataggtaaccaatgtacatgggaggccacatattttgttcactgttgtatctatatttcacatgtggaaactttcagggtggttggtttaacaaaaaaaaaaagctttaaaaaaaaaagaaaaaaaggaaaaggtttttagctcatttgcctggccggcaagttttgcaaatagctcttccccacctcctcattttagtaaaaaacaaacaaaaacaaaaaaacctgagaagtttgaattgtagttaaatgaccccaaactggcatttaacactgtttataaaaaatatatatatatatatatatatatataatgaaaaaggtttcagagttgctaaagcttcagtttgtgacattaagtttatgaaattctaaaaaatgccttttttggagactatattatgctgaagaaggctgttcgtgaggaggagatgcgagcacccagaacgtcttttgaggctgggcgggtgtgattgtttactgcctactggatttttttctattaacattgaaaggtaaaatctgattatttagcatgagaaaaaaaaatccaactctgcttttggtcttgcttctataaatatatagtgtatacttggtgtagactttgcatatatacaaatttgtagtattttcttgttttgatgtctaatctgtatctataatgtaccctagtagtcgaacatacttttgattgtacaattgtacatttgtatacctgtaatgtaaatgtggagaagtttgaatcaacataaacacgttttttggtaagaaaagagaattagccagccctgtgcattcagtgtatattctcaccttttatggtcgtagcatatagtgttgtatattgtaaattgtaatttcaaccagaagtaaatttttttcttttgaaggaataaatgttctttatacagcctagttaatgtttaaaaagaaaaaaatagcttggttttatttgtcatctagtctcaagtatagcgagattctttctaaatgttattcaagattgagttctcactagtgtttttttaatcctaaaaaagtaatgttttgattttgtgacagtcaaaaggacgtgcaaaagtctagccttgcccgagctttccttacaatcagagcccctctcaccttgtaaagtgtgaatcgcccttcccttttgtacagaagatgaactgtattttgcattttgtctacttgtaagtgaatgtaacatactgtcaattttccttgtttgaatatagaattgtaacactacacggtgtacatttccagagccttgtgtatatttccaatgaacttttttgcaagcacacttgtaaccatatgtgtataattaacaaacctgtgtatgcttatgcctgggcaactattttttgtaactcttgtgtagattgtctctaaacaatgtgtgatctttattttgaaaaatacagaactttggaatctgaaaaaaaaaaaaaaaaaaaaaaaaaaaaaaa

SEQ ID NO: 9 - DNA, 5136 bp, Homo sapiens
accttcgcggccgcaactcgctcggccgccgccatcttgcgagctcgtcgtactgaccgagcggggaggctgtcttgaggcggcaccgctcaccgacaccgaggcggactggcagccctgagcgtcgcagtcatgccggccggacccgtgcaggcggtgcccccgccgccgcccgtgcccacggagcccaaacagcccacagaagaagaagcatcttcaaaggaggattctgcaccttctaagccagttgtggggattatttaccctcctccagaggtcagaaatattgttgacaagactgccagctttgtggccagaaacgggcctgaatttgaagctaggatccgacagaacgagatcaacaaccccaagttcaactttctgaaccccaatgacccttaccatgcctactaccgccacaaggtcagcgagttcaaggaagggaaggctcaggagccgtccgccgccatccccaaggtcatgcagcagcagcagcagaccacccagcagcagctgccccagaaggtccaagcccaagtaatccaagagaccatcgtgcccaaagagcctcctcctgagtttgagttcattgctgatcctccctctatctcagccttcgacttggatgtggtgaagctgacggctcagtttgtggccaggaatgggcgccagtttctgacccagctgatgcagaaagagcagcgcaactaccagtttgactttctccgcccacagcacagcctcttcaactacttcacgaagctagtggaacagtacaccaagatcttgattccacccaaaggtttattttcaaagctcaagaaagaggctgaaaacccccgagaagttttggatcaggtgtgttaccgagtggaatgggccaaattccaggaacgtgagaggaagaaggaagaagaggagaaggagaaggagcgggtggcctatgctcagatcgactggcatgattttgtggtggtggaaacagtggacttccaacccaatgagcaagggaacttccctccccccaccacgccagaggagctgggggcccgaatcctcattcaggagcgctatgaaaagtttggggagagtgaggaagttgagatggaggtcgagtctgatgaggaggatgacaaacaggagaaggcggaggagcctccttcccagctggaccaggacacccaagtacaagatatggatgagggttcagatgatgaagaagaagggcagaaagtgcccccacccccagagacacccatgcctccacctctgcccccaactccagaccaagtcattgtccgcaaggattatgatcccaaagcctccaagcccttgcctccagcccctgctccagatgagtatcttgtgtcccccattactggggagaagatccccgccagcaaaatgcaggaacacatgcgcattggacttcttgaccctcgctggctggagcagcgggatcgctccatccgtgagaagcagagcgatgatgaggtgtacgcaccaggtctggatattgagagcagcttgaagcagttggctgagcggcgtactgacatcttcggtgtagaggaaacagccattggtaagaagatcggtgaggaggagatccagaagccagaggaaaaggtgacctgggatggccactcaggcagcatggcccggacccagcaggctgcccaggccaacatcaccctccaggagcagattgaggccattcacaaggccaaaggcctggtgccagaggatgacactaaagagaagattggccccagcaagcccaatgaaatccctcaacagccaccgccaccatcttcagccaccaacatccccagctcggctccacccatcacttcagtgccccgaccacccacaatgccacctccagttcgtactacagttgtctccgcagtacccgtcatgccccggcccccaatggcatctgtggtccggctgcccccaggctcagtgatcgcccccatgccgcccatcatccacgcgcccagaatcaacgtggtgcccatgcctccctcggcccctcctattatggccccccgcccaccccccatgattgtgccaacagcctttgtgcctgctccacctgtggcacctgtcccagctccagccccaatgccccctgtgcatcccccacctcccatggaagatgagcccacctccaaaaaactgaagacagaggacagcctcatgccagaggaggagttcctgcgcagaaacaagggtccagtgtccatcaaagtccaggtgcccaacatgcaggataagacggaatggaaactgaatgggcaggtgctggtcttcaccctcccactcacggaccaggtctctgtcattaaggtgaagattcatgaagccacaggcatgcctgcagggaaacagaagctacagtatgagggtatcttcatcaaagattccaactcactggcttactacaacatggccaatggcgcagtcatccacctggccctcaaggagagaggcgggaggaagaagtagacaagaggaacctgctgtcaagtccctgccattttgcctctcctgtctcccaccccctgccccagacccaggagcccccctgaggctttgccttgcctgcatatttgtttcgctcttactcagtttgggaattcaaattgtcctgcagaggttcattcccctgaccctttccccacattggtaagagtagctgggttttctaagccactctctggaatctctttgtgttagggtctcgatttgaggacattcatttcttcagcagcccattagcaactgagagcccagggatgtcctacaggatagtttcatagtgacaggtggcacttggctaatagaatatggctgatattgtcattaatcattttgtaccttgacatgggttgtctaataaaactcggacccttcttgtgaaatcagttaaataagacttgtctcggtcacctgtgccctgtccagactcgaggcagtggtaacactgcacagtgctatgtggcttctctttgaggatttttgggttttgtaactaaattcttgctgccctcatactttttatgtattagaatcatattcgtattgcccttttaaaacattgggatcctccaaaggcctgccccatgtatttaacagtaatacaggaagcatggcaggcaccatgcaaaccaaggatggatggtgcagtccctgtgtcagtgggcggtggtttcctgctggcctggaatcactcatcacctgattgattggctctgtggtcctgggcaggtgcctcataggtgtgtggatatgatgacgtttctttaaaatgtatgtatttaacaaatacttaattgtattaaggtcatgtaccaaggatttgataaagtttaaataatttactctctacttttatccattttatccattttaactcatgtaatcctcatgtgagtattcctgtttaacacttgagtaaactgaggcacagagaacataagttgcatgccatagtcacacactgtgaaagtgaaaagagaatgtgtgcaaaacacgtcacagtcctggtttctgagtaaaggcaggctgttatctttagaatcaagctatcacagggagataggcaatgctgtgggtgttggaggaaggtgagagcctgttgctaacaatttcctggttttaaagctaaggctgattttattgggaagatctcacatgtgtgtggcccctgagagttcccagtgccttttatttgcagtccttccatttggacctcctagctgccccatcaggtcatctccagggctcagaggggtgagaccatttcccaaggtcacagaaccagctctctagtcaccaccctgcctctccctctcacccagagtcagtaccagttttatggctttattacaaactgctgggtccctcccattttcaacttgattgatgggatgtcatcccttatcctgtctgacatttgcctctggcctggttgctagaagtttgccccaggggcaagagttgaaatttggcttcctgaggtgggctttgtggtttgcgtccctaaagtgagcccactactggttgcttgtccatggccaacaccagaaatcccctgagcactacctgggtctcattccaagaaggaagagggtcaggagacctggggagtctcatattccaagttcttctttctttctgggagcagtgggcagttcatggtgttagggcactcacccccacagactggcaaaccctgcaggacttccgtggctgaggctgtgaccggaggccaggaatgccgttgggtggattgtgagtgaatgggccctttgagctgccctctagagagcaaatccagtttcctggagctcctgaatgaatatctgtactggctcgctcagatgcagaagctccattgaccatgaggccttgtgaacatcagtggccacaggcccagtgtgctgcttggcactgcactagtttaggacctgcagcatgtaggtagcgtcctagtgtttataatacaaagctgctctgcacagcttttctgattcttcttgcaatctcctgaggattatctgccccatttttaaaacgaggtggaatacccaaggtcatgtagccagtgagtgctctggaaagccaaagcagctcatcccttcctggggaccacactgctctgctccaccagaccacactatgaaataggaataagtgctcctgttgcaggactgctgggaaaacaggtggtgtgggacttaagtcaccataattttgaagacttgcatgcagagggctccaggaattgtagacattaaggaatttcactttcagttctacccactacttaagtacttgtcatgtactcttagaggaggccagtaatgatcagaaccattttactttaaaattaataatattgtattagagaatatattaaatggttatattgggttatgttaggatatatacttgaatggaaatacatgtactattagcaatcatatttcatttatccctgtaattagacaagaaagcataatatagctctactcatgggtacacataccagtgtataagatttttagaagtttactttttaaaaataaaagcaaaatgtaagatcttaaaaaaaaaaaaaaaaaa

SEQ ID NO: 10 - DNA, 6368 bp, Homo sapiens
ctgagctgccgcggcggcggcggcgcgaccgagcatcctggcggcgccgggccactgggagagtttatgtggccgaggcagacaagtggaattaggccttgctgcaggggacttcatttccttctcagtactggacccatttatgaggaggtggcttatgaaagtgtgatgttcgcgtatttcttgacaggcagtggcgtgatcttggctcactgcaacctccgactccctggttcaagcgattctcctgcctcagcctcctgagtggggattacaggccacagcaaacacaggtgtgcaggaaccgtttgtcatggaagccagggagcctgggaggcccacacccacctaccatcttgtccctaacaccagccagtcccaggtggaagaagatgtcagctcgccacctcaaaggtcctccgaaactatgcagctgaagaaggagatctccctgctgaatggggtcagcctggtggtgggcaacatgatcggctcagggatctttgtctcacccaagggtgtgctggtacacactgcctcctatgggatgtcactgattgtgtgggccattggtgggctcttctctgttgtgggtgccctttgttatgcagagctggggaccaccatcaccaagtcgggagccagctacgcttatattctagaggcctttgggggcttcattgccttcatccgcctgtgggtctcactgctagttgttgagcccaccggtcaggccatcatcgccatcacctttgccaactacatcatccagccgtccttccccagctgtgatcccccatacctggcctgccgtctcctggctgctgcttgcatatgtctgctgacatttgtgaactgtgcctatgtcaagtggggcacacgtgtgcaggacacgttcacttacgccaaggtcgtagcgctcattgccatcattgtcatgggccttgttaaactgtgccagggacactctgagcactttcaggacgcctttgagggttcctcctgggacatgggaaacctctctcttgccctctactctgccctcttctcttactcaggttgggacacccttaattttgtaacagaagaaatcaaaaacccagaaagaaatttgcccttggccattgggatttctatgccaattgtgacgctcatctacatcctgaccaatgtggcctattacacagtgctgaacatttcagatgtccttagcagtgatgctgtggctgtgacatttgctgaccagacgtttggcatgttcagctggaccatccccattgctgttgccctgtcctgctttgggggcctcaatgcatccatctttgcttcatcaaggttgttcttcgtgggctcccgggagggccacctaccggaccttctgtccatgatccacattgagcgttttacacctatccctgctttactgttcaattgcaccatggcactcatctacctcatcgtggaggatgttttccagcttatcaactacttcagcttcagctactggttcttcgtgggcctgtctgttgttggacagctctacctccgctggaaggagcccaagcggccccggcctctcaagctgagcgtgtttttccccatcgtgttctgcatatgctccgtgtttctggtgatagtgcccctcttcactgacaccattaattccctcattggcatcgggattgccctttctggagtccctttctacttcatgggtgtttacctgccagagtcccggaggccattgtttattcggaatgtcctggctgctatcaccagaggcacccagcagctttgcttttgtgtcctgactgagcttgatgtagccgaagaaaaaaaggatgagaggaaaactgactagaggtcagaggtggctttctgaggcctggaaggcaggccaaccagcaaaatcctgataacaagactctgtgggcccaactctcctgaattaaaggagccttttgacccaatcatatagtggggctcagggccagtgctcactcttattggtaagctataggagactcaggatctgggccaacctcaaggtgggggcttcagagggtggggggaagattggggaacggggggaatggtcatttagttttactcctgataggtagatgcagctcttacagatatttacttggtaaagtgcagtggggaagagggaatgctaggttgatagggctggtggcttctgaatttggtatttgaactaggagtccctatagaggggctgctttatgggaagtttttctctgaccaggtacaacacctgactttaaaggcctgaaatgctaccatttcttcctctggctcaaaattcttccctggggagagagttatattcccttatttattgatatttagtccagaacaccagttctaacgaagcatgcgtgtctcttcatctacaggatgcaataggctgattgtatttaaaaatcaaagtacccaaaactgagtccctttgggctcagaaatgtctgtggtattgggtcagactctgaccacaggttttatgctgtttagcacaatttctattgagtcttacctgcaacaatgaaccttaaagatttttttactcacgtacctgttacactttagcatacagatagatcatagatcacgttacaagcacttggctcaggtccagcaaggacagatgaacaaattcctgagtcagaagtctgttaatattgctgttttgaaggacaatcctttattttacttgagaccttacatctttgttctagctgacagtaaatctctgggtttctgttacgaactctaagagggctgaaacttctgatattcaggtggatcacctgaattctctcagctgtcaatggcttggagaacatctcatgggcccaagtcatcaaataacctgttcctctctgtaagggcagtgtgagggactgctgtgcagacccaagcaatcccaacctggtgctaggtcatttcacttttctgaaaacctcacatcaggctgcatcctcttctgtccctggcaccaggctttgtttacacttggagccaccttggtgtgggtcaccgggacagtgtactcctctcctgccagcctccccttccccgaggtgtggtggctgcagtctcaggaagagcttggtacttgtggggacttctgttttctccctgtggagatcagtgaagactgggaggaaagctgcttcaacctgagtccggctcttcagcaggctgcacaagtggaagcaactaattctggtgctcaggctgggctctccacccaagttaggcctgctctggcctaatggatcttactgtatgagcaggacggctgcattggattgtacaactgttttgtgatgcccccagacactgtcatcctgggccgagaagaacctgctagcttgacataccccatgggcttatccttaggttttggaattggtcaacagtgaggcagtctcccttcctgaccattcttctccacccagtcacagataagggaataaccttggccatatatttgctcaataaagattgaaggaagcatggtcatagttgccctgggttcagagcataatgcatatgtgaagcatggggtgacattcctactgtcatgggtttgggatttgtaacggcaaattcctgcccgacgacagggtgtcttatgcaaaggctgacttgcctgaacgctaagaacatgacttctgtctgagctaagctggcacccatcccagggctcctctggagctaatcctttaagcaaaatgtgcttgccttttaaagatccctgaccccagctttagctttctccaccagataaccagctaatcccaggaatttgctgccccccaccagtggcttctagggaaagcaaggacctcacatgccaggtgccctagtacttgcttagtgagccatgtcatcctcctttcatttttggatggtgacagcatttttcccctctgtgctggatacagacttctcccaggatcctctctttgggagcgaagccagaggatccctacagcactcaagcttcatggtggaattaatttctgccagctctttgttgtctgtctccttaaatccttttcctggtgtgcttattatcccttttgcagtgagtacagtttattaagttgtcagccctttaatattggggaaacttaatgagtataaatagcagggagcacattgtaacagcacagtgttttgtttttttcacccggttgctgtatgagaatggctttcaatcctttgtttctatgcctacagacagaaagcaagatgtctaatattagacatacaagttgctgcctgttataacggtgaattatacctttgtgcatgcctaggatgtttgttgttttaattagctgcaatatatacggcctgtgtacacagaatttaatcacttcggcaggttgaacaactccatgtagataagagcaagtgtaggcaaaggtttagaaaatggacataaagtcaaagaatgatggcaggtaggatgaaggagagatacttaggaaatcctaaaagaggcggcaagaaggtacctccctgtgtaactcaccttcccccatgacagtgagtaagagacactcacaggctatgagggtacacccctagctgaatgttctgtgttgtttccttagacctgtggtgtccgctgcaacagctactagccacgtgtagctaattacattaaaatgaaataaaattaaaagctcagtttctcagttgcgctaatcacatttcaagtgctcagcagccacccgtgtctactactacacagtgcagacacagaacatatcatcactgcagatagttctactggacaatgttacgctagaataaacaccaaggcagtcagttaaggcagctatggtttggaaaggcatacggacagagtctgcttagaagagatacaagttgttaataaaattgatcctgttgatagtagtttgtttttgtggtgggtgctgtgaagagtaaacattactcagtggaaagctaagttcagaaggtactttgtttttcctcccttgccttaagtccttggtatttataatcaatgctgaaccttctatttcactaccgctccctgttttagatattcagatttaaaaggttttcaaagaattactttcttccatgttcaaagctagattttactaaacacatgtatcacattcatatatattgtttcttggccccactgccaaaggaagtcagtcagtaatttcacaaccgttatcagagtttggaagcagaaatagctgttaactaaaatctcccactgctcagactactttctgccctaatggccattactatccagtctgtattgctacaagggacccactggtaccccttttagattctatcaaaaggaacagggttttcctagaggcaggcagcctggtggtatggcacagcagaagcttactgctaatgaaatgggaacctccccctcccttgtggtttcagcacagaacctgaatgccaggaaaaattcctgggccaagaagctaaagctaaagaaaccttccttttttcaacgtttttttttctttcaaactgtagggtcacttttgattgaggcaaaggggtcctactgtaagtggaaaagactcactcccctaacataagttttcactgtggtgggatggtgccgcccgatatgcttgatatgcttttccttccacatgttaagctaggaaacctaacaggatgtcagcagggcagttaactctggactcagagccctcaagggcatgtggcagaacctcatggacatcacaagaccatcagtctgaatccaggtcgtgggggctgtcatagccgaactccttctgcacatccagagggtacttgctccacatccgctgtctgctgctgcctctttcctcctcactcaggctgttgtagtcagcagagcctagaatgacatcccgggagtggattctaaatgtgattttcctaggctactgcaggagccccttctcttctcagaaaggtctgtttttgttcccgattgtaatgcaaaatccttgctcaataaataaaaaagaatatagaattcttttttttttaaagaaggaatcactttcctatcatctaaaccaagttccttcacactggagtattttgtcacttctcccctccgtggagtattttgtcacttctcccctccgtataggattttttgttgttgtaagagttgtagtcatattgtaaatatttttgtacctttctccttttaacgtgttattgacaaacctccccaaaagaatatgcaattgtttgattcatttctctgttatcagacaccaataaattctttttgttgggccttcaaaaaaaaaaaa

SEQ ID NO: 11 - DNA, 595 bp, Homo sapiens
gggcaaggctgggccgggaagggcgtgggttgaggagaggctccagacccgcacgccgcgcgcacagagctctcagcgccgctcccagccacagcctcccgcgcctcgctcagctccaacatggcaaaaatctccagccctacagagactgagcggtgcatcgagtccctgattgctgtcttccagaagtatgctggaaaggatggttataactacactctctccaagacagagttcctaagcttcatgaatacagaactagctgccttcacaaagaaccagaaggaccctggtgtccttgaccgcatgatgaagaaactggacaccaacagtgatggtcagctagatttctcagaatttcttaatctgattggtggcctagctatggcttgccatgactccttcctcaaggctgtcccttcccagaagcggacctgaggaccccttggccctggccttcaaacccaccccctttccttccagcctttctgtcatcatctccacagcccacccatcccctgagcacactaaccacctcatgcaggccccacctgccaatagtaataaagcaatgtcacttttttaaaacatgaaa

SEQ ID NO: 12 - DNA, 959 bp, Homo sapiens
aaaaagaggaaaaaagtttctcaagtcgccgctgcacgacgtctggccggcgctggagcgggggtctgcgctctcccgagcggccgcgcgctggactttattgtgccgcaaccagccccagttcccattgtttgtgtttttttcaaaatatggcaaaggttcaggtgaacaatgtagtggtgctggataacccttctcctttctacaacccgttccagttcgagatcaccttcgagtgcatcgaggacctgtctgaagacttggaatggaaaattatctatgtgggctctgcagaaagtgaagaatacgatcaagttttagactctgttttagtgggtcctgttcccgcaggaaggcatatgtttgtatttcaggctgatgcacctaatccaggactcattccagatgcagatgcagtaggcgtaactgttgtgctaattacttgtacctatcgaggacaagaatttattagagttggctattatgtaaataatgaatatactgagacagaattaagggaaaatccaccagtaaaaccagacttttctaagcttcaaaggaatattttggcatctaatcccagggtcacaagattccacattaattgggaagataacacagaaaaactggaagatgcagagagcagtaatccaaatctacagtcacttctttcaacagatgcattaccttcagcatcaaagggatggtccacatcagaaaactcactaaatgtcatgttagaatcccacatggactgcatgtgaccacctaccatccctttagtacaaattaaggtattaaaaatacacagaactatttccctgaaattccgtaagtacatagtcaaaacacaatgtgaagaatttgtttaaaaacatcctgtagaaagtttataagaaaaccagtatttgaacaaattgtggaatataaatacaactatttttaagtaaaaaaaaaaa

SEQ ID NO: 13 - DNA, 1094 bp, Homo sapiens
ccgccccggtccgcaaagccggtggcgcccggaggctgcacggagagcggtgcccgcgtcagtgaccgaaggaagagaccaagatgaatgcagagcccgagaggaagtttggcgtggtggtggttggtgttggccgagccggctccgtgcggatgagggacttgcggaatccacacccttcctcagcgttcctgaacctgattggcttcgtgtcgagaagggagctcgggagcattgatggagtccagcagatttctttggaggatgctctttccagccaagaggtggaggtcgcctatatctgcagtgagagctccagccatgaggactacatcaggcagttccttaatgctggcaagcacgtccttgtggaataccccatgacactgtcattggcggccgctcaggaactgtgggagctggctgagcagaaaggaaaagtcttgcacgaggagcatgttgaactcttgatggaggaattcgctttcctgaaaaaagaagtggtggggaaagacctgctgaaagggtcgctcctcttcacagctggcccgttggaagaagagcggtttggcttccctgcattcagcggcatctctcgcctgacctggctggtctccctctttggggagctttctcttgtgtctgccactttggaagagcgaaaggaagatcagtatatgaaaatgacagtgtgtctggagacagagaagaaaagtccactgtcatggattgaagaaaaaggacctggtctaaaacgaaacagatatttaagcttccatttcaagtctgggtccttggagaatgtgccaaatgtaggagtgaataagaacatatttctgaaagatcaaaatatatttgtccagaaactcttgggccagttctctgagaaggaactggctgctgaaaagaaacgcatcctgcactgcctggggcttgcagaagaaatccagaaatattgctgttcaaggaagtaagaggaggaggtgatgtagcacttccaagatggcaccagcatttggttcttctcaagagttgaccattatctctattcttaaaattaaacatgttggggaaacaagaaaaaaaaaaaaaaa

SEQ ID NO: 14 - DNA, 1596 bp, Homo sapiens
ccctcttccgggccgcgagccccctgcgcgccgctttggggctgcgctcactcgtgtgcgcgctcgtccgcccgccagtcctctcaacgcgcgcttggccgcccgacgacgcgggagccgcacgcgccggacgaggctcgctgcgctccctgttgcccagcgcgggcccgttgaggcggagccctcagttcccggccaggacacggtctgggccgccgaatctccggccgaagagcggcggcggcagcggcgggaaaaaaatgaagaatgaaattgctgccgttgtcttctttttcacaaggctagttcgaaaacatgataagttgaaaaaagaggcagttgagaggtttgctgagaaattgaccctaatacttcaagaaaaatataaaaatcactggtatccagaaaaaccatcgaaaggacaggcctacagatgtattcgtgtcaataaatttcagagagttgatcctgatgtcctgaaagcctgtgaaaacagctgcatcttgtatagtgacctgggcttgccaaaggagctcactctctgggtggacccatgtgaggtgtgctgtcgtagagatggggtttcaccatgttggccagactgctctcaaactcctgacctcgtgatccgcccgccttggcctcccaaagcgctggattacaggcgtgagccactgcgcccggcctcctcctttttgattatgtatggagagaaaaacaatgcattcattgttgccagctttgaaaataaagatgagaacaaggatgagatctccaggaaagttaccagggcccttgataaggttacctctgattatcattcaggatcctcttcttcagatgaagaaacaagtaaggaaatggaagtgaaacccagttcggtgactgcagccgcaagtcctgtgtaccagatttcagaacttatatttccacctcttccaatgtggcaccctttgcccagaaaaaagccaggaatgtatcgagggaatggccatcagaatcactatcctcctcctgttccatttggttatccaaatcagggaagaaaaaataaaccatatcgcccaattccagtgacatgggtacctcctcctggaatgcattgtgaccggaatcactggattaatcctcacatgttagcacctcactaacttcgtttttgattgtgttggtgtcatgttgagaaaaaggtagaataaaccttactacacattaaaagttaaaagttcttactaatagtagtgaagttagatgggccaaaccatcaaacttatttttatagaagttattgagaataatctttcttaaaaaatatatgcactttagatattgatatagtttgagaaattttattaaagttagtcaagtgcctaagtttttaatattggacttgagtatttatatattgtgcatcaactctgttggatacgagaacactgtagaagtggacgatttgttctagcacctttgagaatttactttatggagcgtatgtaagttatttatatacaaggaaatctattttatgtcgttgtttaagagaattgtgtgaaatcatgtagttgcaaataaaaaatagtttgaggcatgacaaaa

SEQ ID NO: 15 - DNA, 1011 bp, Homo sapiens
atgaagaaggagcatgtgcttcactgccagttctccgcgtggtacccgttcttccgaggcgttaccatcaagagtgtcattcttccacttcctcagaatgtgaaggattatttactcgatgatggaactctggtggtttcaggaagggatgatccaccaacacattctcagccagacagtgatgatgaagcagaagaaatacagtggtctgatgatgagaacacagccacgcttacggcaccagaatttcctgagtttgccactaaagtccaggaagctatcaattccctcgggggcagtgtctttcctaagcttaattggagtgccccaagggatgcgtattggatagcaatgaatagttctctgaaatgtaaaaccctcagcgacatctttctgcttttcaagagttccgatttcatcactcgtgacttcactcagccgtttattcattgtactgatgattctccagatccatgtatagaatatgagctcgttctccgaaaatggtgtgaattgattcctggggctgagtttcgatgttttgtcaaggaaaacaagcttattggtatttctcaaagagactacacacaatactatgatcatatttctaaacaaaaggaagaaattcgcagatgcatacaagactttttcaagaaacacatacagtacaaattcttagatgaagactttgtgttcgatatatacagagacagtagggggaaggtgtggctcattgactttaatccatttggtgaagtcacagattcactgctgttcacctgggaagaactgatatctgagaacaacttaaacggcgattttagtgaagttgacgctcaagagcaggattccccagctttccgttgcacaaacagtgaagtgacagtccagcccagcccctatttgagttaccggctacccaaggactttgtagacctctctactggggaggacgctcacaagctaatagacttccttaagctgaagagaaatcagcaggaggacgattaa

SEQ ID NO: 16 - DNA, 2234 bp, Homo sapiens
gtgcatccctgccccttctgggtacccgtaggcgctcccgggcgctggcggcggcggaggagagggagcagcgtcacgggcgcccggcccgttaaaacgctgctggctggagccacctccctccctgcagcccgcaacgggaatggagtaaagggagacccgtcgacctggccacggggatcagcgatggaattaaagcaatctttgtccacccatctggaagccgagaagcctctgaggcgctatggggcggtggaggagacggcttggaaaacggagagactggggagaaatcagctggacatcatctccatggcggagacaaccatgatgccagaggagattgagctggagatggcaaaaattcagcgtctccgggaagtcttggtccgccgggagtctgagctcaggttcatgatggatgacatccagctctgcaaggacatcatggacttgaagcaggagctgcagaacttggtcgccatcccagaaaaagaaaaaaccaaactgcagaagcagagagaggatgagctaatccagaagatccacaaactggtgcagaagagagacttcctggtggacgatgcggaggtcgagcggttaagggagcaagaagaagacaaggaaatggctgatttcctgagaatcaagttaaaacctctagacaaagtaaccaaatctccagccagctcccgggcagagaagaaagcagagcccccacctagcaagcccacggtggccaagacggggctggcactgatcaaggattgttgcggggccacccagtgcaacatcatgtagcccccacgtggggtgccctgggccatggggacccccccccaccctcttgtctttatagcccccatttcaccggggcccaagagctctccaaggcagaaggggttgaaggcaagcccgtgactgtcaccagaggccatgggcacggcaggcgggcctggccaccctgtacagagtgtagcagtagggagtctctcaccgtcgcatggtcctccccagagcatgccgaacccaggagtctgtctcactgtttatccaaacaccaggaaaggtcctccctcaaaaaagcatatctccacttctctctagctgtatctaacccaccgtgtgaatgaactgggagaggggcatgctccccagctgtgtgtagtcgtgacttctcaacaatctagcaccatgtcggacacgttccccatccaccctcctagctctgctctcagagctaggcacatgggcacaggtcccctcccgtctgtcctctcccagcaactgtgccctggagggctccacatggcccccgtgtctctcgggcaccacccatatagcagtcccagagggcccatctgtaaagatcgagcttgtgtgtggtgtcgtggtcacatctcccgcttccccccatcctgtgtctgggcacagttcacatcaggacagcgtccattgtgctctcagtctgcctcaggtgtgtgcctggagggggcctggactggcatggatccagtgtgcagaagagccagcagggaaccggaagctctgatgtcaaggccagagcagttgagaatgggacccagagtagatgctgacctgggcactccaccattccggggccaccacagagatgccagcaggatgccactttgccagcccgacacacggacctttgtaaagaacagcaacaggcaggagaggcagcgtgtgaccagattgtgtcccgtcattgggtggcatatgttaactagctgccaaacaacttcaacccgtgtaattcatgtacatttgcaacagccagcccggtacagcctgtgtgacttctctgtatgtgtgtgtgtgtcgtgaccagcctaagtagttagcataactcaagatgctgatgtgcagtcacccatcagagaaaataaaaatggaaaccacgttcacagcattttaaaagtttttactttttttcttgattatggaagtaatccatgtacatagtaaatcattttaaaagtacaaaaagtatgaagaagtttgtcttaaaaaaaaaaaaaattattcctccaactagagaccactctgatgtttcgacgttttaaaaaagtctttttttgtgcattttttcatcgttgacatcatattgtggtatcatttataaccagttttttcctacttattataccaccatcttccacatcattaaaagctctttgtaaacattaaacactcttcataaatcaaaa

SEQ ID NO: 17 - DNA, 2371 bp, Homo sapiens
gcctcgcctcggcgccgcggccggcatttctcctcgcagctcgctgcctcctctatccctgcctccctctcccccctctgtttttctcccttccttccctctccgaccctcttcctctccctcccgatcctttccctcctcctctcatctttcccctgtctctccgttctagctcgtcccccaccccaccttttcttctttctcctcctctccttcctctccccctctcctctgtctccttccaccgtctcccctgcctccctgtctttcagtccctgtttttcagccccgtctccctctcggtttctctcccccaccctccctccgggtttcctccccggtgccctccctcctctctccctcccctccccctccgcccctcgcagccccgccgctcgcagctcccagtctgcctccccgaaccggcgccgccgcccgcactcgccgcaggaccggcccgcccggctcccggggtgcgccctcctcggtcccgcgccctccgggctcgcagggacgtctcctccctcccggctcgcggccccgcccggcccggcccccgcccagagccccagcgcgccgaggatgtgagtcctgctcgcctctggcggagcagcagccactcgcgcgcggagccggagcgcagcgcagcgcagccgcgggcgctctccgggccgctcgcgcgagtgccgcgctcttgccctagcggcgtcccccggcctctcgccggcgccaccgccgcagcagcccgcgggccgtccccggccggccgcccccggccccagcgccgctgaccctgtccgccgcgggcggggacgcgggcggaggaggcgccgcggcggagcccccggacgcgaccatgtcggaggtgctgccctacggcgacgagaagctgagcccctacggcgacggcggcgacgtgggccagatcttctcctgccgcctgcaggacaccaacaacttcttcggcgccgggcagaacaagcggccgcccaagctgggccagatcggccggagcaagcgggttgttattgaagatgataggattgatgacgtgctgaaaaatatgaccgacaaggcacctcctggtgtctaactcccccaaagacaatgagttaagggagagaataagaacggcggtaacagttattggcaaaaagcatgaaaagagaaagcactttgaaatttattactagcttgctacccacgatgaaatcaacaacctgtatctggtatcaggccgggagacagatgaggcgagaggaggaggaggaggaggagaaggctctgggctcctctgcaaaaataaaaataaaaaaataaataaaattttaaaaataataaaaattcactatatacacatataaagaaataaaaagaagtctcagttgcagctatttgtcaaaattaatatccatttctttttatatacggtgaatattgcgcaattatagatctggattttgaaccacttaatgaagcggcaacaccaggtgttttgaggtgttggcattcttcgctgatttggctgttcccaatgtttacattatttaatcttgcaaaaatggttctgtgcacttggatgtgaaatgctgtccagttttattttttttatgttgttatccttggatgtacaaaaaattcagaaaatgatctctgtagatattctgttttattttggtcatctttagaagttatcaggaatgtgtttaaaacaagaagagaacttttctaaggaatgatacatagaaaagattttattttaaaatgagttgtaaagcttgtgtttctttgttgctgcaagctatctgcccaagttaatgcaaatggacacattttttatgtcagaaaaacacacacacacacacacacacacacacacacacacgaaaaacaaagaaaaaaatgcttgagctttttctaacttccccttgcagtctgttgtgtgagcagcctgtttatttctctaatattatgtcagtttattctctttaatggactgtaaaaaaatgtaatcacaagagtgccaaatatcttgaaatgccaaaaggcattttagtttcttttctctgtgctctgagtccacgtacaggaatgcttggagtgtcttttctgttatttatagggattctcttaaggcacaccagctgcctgttttgcatggtatttgcaaaaatgcctcttgcgtgaggaaatcttttaccattttttgtttgcaactttggacctcaagaggtttcccttcccttccccgttccctcttttcttaattcaatattctgtatgttgcaccttgaaccagcacacagggctatttctccaatgtacaataaaagaattgttcctgtgtctcaaaaaaaaaaaaaaaaaaaaa

SEQ ID NO: 18 - DNA, 1486 bp, Homo sapiens
gacaggctgtcgaaacctcagtggataaaagacctagagaatgtgtatcccagaagaagctggccaaggatatgggagcaaccaccatggaccagaagtctctctgggcaggtgtagtggtcttgctgcttctccagggaggatctgcctacaaactggtttgctactttaccaactggtcccaggaccggcaggaaccaggaaaattcacccctgagaatattgaccccttcctatgctctcatctcatctattcattcgccagcatcgaaaacaacaaggttatcatcaaggacaagagtgaagtgatgctctaccagaccatcaacagtctcaaaaccaagaatcccaaactgaaaattctcttgtccattggagggtacctgtttggttccaaagggttccaccctatggtggattcttctacatcacgcttggaattcattaactccataatcctgtttctgaggaaccataactttgatggactggatgtaagctggatctacccagatcagaaagaaaacactcatttcactgtgctgattcatgagttagcagaagcctttcagaaggacttcacaaaatccaccaaggaaaggcttctcttgactgcgggcgtatctgcagggaggcaaatgattgataacagctatcaagttgagaaactggcaaaagatctggatttcatcaacctcctgtcctttgacttccatgggtcttgggaaaagccccttatcactggccacaacagccctctgagcaaggggtggcaggacagagggccaagctcctactacaatgtggaatatgctgtggggtactggatacataagggaatgccatcagagaaggtggtcatgggcatccccacatatgggcactccttcacactggcctctgcagaaaccaccgtgggggcccctgcctctggccctggagctgctggacccatcacagagtcttcaggcttcctggcctattatgagatctgccagttcctgaaaggagccaagatcacgcggctccaggatcagcaggttccctacgcagtcaaggggaaccagtgggtgggctatgatgatgtgaagagtatggagaccaaggttcagttcttaaagaatttaaacctgggaggagccatgatctggtctattgacatggatgacttcactggcaaatcctgcaaccagggcccttaccctcttgtccaagcagtcaagagaagccttggctccctgtgaaggattaacttacagagaagcaggcaagatgaccttgctgcctggggcctgctctctcccaggaattctcatgtgggattccccttgccaggctggcctttggatctctcttccaagcctttcctgacttcctcttagatcatagattggacctggttttgttttcctgcagctgttgacttgttgccctgaagtacaataaaaaaaattcattttgctccagtaaaaaaaaaaaaaaaaaa

SEQ ID NO: 19 - DNA, 1976 bp, Homo sapiens
agaaaaacttgtgcggggccatttttggggcagtaagatcgagcgaggagcccaagagcgagcgcgcagcacgaagctcgagccgcctccgccgcgcgaccccacctcggccgccgccgcctgcgccgcgagatccgccccggcctccccgagagcgagccccggccgccgcgaccaccagccgcgctaaccgccgaccaaccgccaccgaggcgcctgagcgagagcagaggaggaggaggcatgagtgaggcgggcgaggccaccaccaccaccaccaccaccctcccgcaggctccgacggaggcggccgccgcggctccccaggaccccgcgcccaagagcccggtgggcagcggtgcgccccaggccgcggccccggcgcccgccgcccacgtcgcaggaaaccccggtggggacgcggcccccgcagccacgggcaccgcggccgccgcctctttagccaccgccgccggcagcgaagacgcggagaaaaaagttctcgccaccaaagtccttggcactgtcaaatggttcaacgtcagaaatggatatggatttataaatcgaaatgacaccaaagaagatgtatttgtacatcagactgccatcaagaagaataacccacggaaatatctgcgcagtgtaggagatggagaaactgtagagtttgatgtggttgaaggagagaagggtgcagaagctgccaatgtgactggcccggatggagttcctgtggaagggagtcgttacgctgcagatcggcgccgttacagacgtggctactatggaaggcgccgtggccctccccggaattacgctggggaggaggaggaggaagggagcggcagcagtgaaggatttgacccccctgccactgataggcagttctctggggcccggaatcagctgcgccgcccccagtatcgccctcagtaccggcagcggcggttcccgccttaccacgtgggacagacctttgaccgtcgctcacgggtcttaccccatcccaacagaatacaggctggtgagattggagagatgaaggatggagtcccagagggagcacaacttcagggaccggttcatcgaaatccaacttaccgcccaaggtaccgtagcaggggacctcctcgcccacgacctgccccagcagttggagaggctgaagataaagaaaatcagcaagccaccagtggtccaaaccagccgtctgttcgccgtggataccggcgtccctacaattaccggcgtcgcccgcgtcctcctaacgctccttcacaagatggcaaagaggccaaggcaggtgaagcaccaactgagaaccctgctccacccacccagcagagcagtgctgagtaacaccaggctcctcaggcaccttcaccatcggcaggtgacctaaagaattaatgaccattcagaaataaagcaaaaagcaggccacaaccttaaccaacaccaaagaaacatccaagcaataaagtggaagactaaccaagatttggacattggaatgtttactgttattctttaagaaacaactacaaaaagaaaatgtcaacaaatttttccagcaagctgagaacctgggaattcctgcacggaagacaagagagtagcctctccagtttcagcaaccgctaggtttctattttttttcctggtttttactgttttggtaatatatatattgaaacaagaaatattaataccacatggggagaaccccaaccaaagaaatctgaaatatatagtaaatgcttttttttccgtttttgttcattttggatgctggtgctaaacctccaagtgtcatgatttaaaaaaaaaaaaaatttatgtccttcttatttatttctaggatgaggggaggataacatttttgctttcttatgtgactctctttgaaaatgtgcagtaagaaattcctcaaaaataaaatttttacccttcagaggacagaatgtttaaaa

SEQ ID NO: 20 - DNA, 1005 bp, Homo sapiens
gaggattgggaggaactcgacctactccgctaacccagtggcctgagccaatcacaaagaggattggagcctcactcgagcgctccttcccttctcctctctctgtgacagcctcttggaaagagggacactggaggggtgtgtttgcaatttaaatcactggatttttgcccaccctctttccaaataagaaggcaggagctgcttgctgaggtgtaaagggtcttctgagctgcagtggcaattagaccagaagatccccgctcctgtctctaaagaggggaaagggcaaggatggtggaggctttctgtgctacctggaagctgaccaacagtcagaactttgatgagtacatgaaggctctaggcgtgggctttgccactaggcaggtgggaaatgtgaccaaaccaacggtaattatcagtcaagaaggagacaaagtggtcatcaggactctcagcacattcaagaacacggagattagtttccagctgggagaagagtttgatgaaaccactgcagatgatagaaactgtaagtctgttgttagcctggatggagacaaacttgttcacatacagaaatgggatggcaaagaaacaaattttgtaagagaaattaaggatggcaaaatggttatgacccttacttttggtgatgtggttgctgttcgccactatgagaaggcataaaaatgttcctggtcggggcttggaagagctcttcagtttttctgtttcctcaagtctcagtgctatcctattacaacatggctgatcattaattagaaggttatccttggtgtggaggtggaaaatggtgatttaaaaacttgttactccaagcaacttgcccaattttaatctgaaaatttatcatgttttataatttgaattaaagttttgtcccccccccccttttttttataaacaagtgaatacattttataatttcttttggaatgtaaatcaaatttgaataaaaatcttacacgtgaaaaaaaa

SEQ ID NO: 21 - DNA, 4785 bp, Homo sapiens
acctgcttccctctcggatagccagggctgatgatttcaactcattaatcattccgaactcttcccaacaaacagcctcatggctgtcccggacctcctctgtcccggctcaggaaatgatctcggtcggaagtgaaaagaccaaatcggccccaggaggccattttcttcgacagaagctgaggcgtgggggcgtggccttcccccgcttccccctccactcccccgcccgcccccggccccggctttccgatctcggcccagggaagagccttggtcgcgaatcaccagtttgcatttgcccctggggcgggggcggctttctgagaccaggctggggctgggactccgccaccttcagctaagggtaccgaggtcagtccgggagtcgcgtcaccgggactcgaacccgcctcttcgtcttccgaggcctagtgcgagcctgcggcgctaaacgcagtcacactgtccctttaaggcggcactttttattcttcatttgtttacttcttcatgcgctcttcggtctttacaaaatgtgctcgcgatatccttccgcaagtgtcagtctcaggcactcaccacccgccttgaagccatttctataatcttaagactcgcgagttagcagccgtgggccgacgtctctctttataggatttaattcttttacattttagggactactttttaggaataaaccattcttgcgttagttaataaaggttcataaccttcggaacccctccgctgagaacaaaatacgataatagcctttataacgcaccttttcataaaaatattctgtgaggactctcataggccatcgaatcttctcgtattcctgaaacagaatggtacggtccagaacccgccccatcttctctgcgattggccgtccttcctcagcgagtcgtgtgatttttcaccaatggccgctcgcgtttctttagcgaggtctaagcgatggaaggtggcggccagggagacgccccctacgcgtcctgggattggctacgtcgcacggcgcgcgagggcggcgggcccgaaagataagaactacgactcccggcgccccgcaaagggaactccgttacgcatgcgcacgggcggggcgaaaaagcttctatataaaaggggcgcagaggactgggagacagcagttggaagttggcaggtggagaggcaggttgggagggaaagtcgggggaggacgcggaagaggagctgtgggaagggggaggagggagggaggaaaagaggaggaggcggaggagaactgagcagagcagagcatcgagccaaaggggagatgagtttgtctgtcctctgctgaggctacggccgggcctagggaactgggagcttgggtggaagcgacacccgtggaagtgggaggaggtggcgccgggactttaaccccttgtgggctctgcggcaggggatttaaccctttgtggatctggcccctcggaggcagcgtcatcggtagttttaaccccttcggggctgggtttcacgcactggacttaccctcatcaccttgctcaccaactcctttattggggtgctccgcttggaggtttgaggcccacctccgcccattacgtactgttcctgccgctgcacccccttggacccgctagctggccgcactgtgggcgcttaaccctttactgacttgagctccccagattgcagttggagtttgctgatagaaggactagctaaaggcgtcactgcaggaattacaaactgaagaggactctgttggactgttttttttttctttttcttttttttaagaaaaacccatttttttccttaaggacttactagccaaaatttcttaaacttcgaggactctactagccatggccgagccattcttgtcagaatatcaacaccagcctcaaactagcaactgtacaggtgctgctgctgtccaggaagagctgaaccctgagcgccccccaggcgcggaggagcgggtgcccgaggaggacagtaggtggcaatcgagagcgttcccccagttgggtggccgtccggggccggagggggaagggagcctggaatcccaaccacctcccttgcagacccaggcctgtccagaatctagctgcctgagagagggcgagaagggccagaatggggacgactcgtccgctggcggcgacttcccgccgccggcagaagtggaaccgacgcccgaggccgagctgctcgcccagccttgtcatgactccgaggccagtaagttgggggctcctgccgcagggggcgaagaggagtggggacagcagcagagacagctggggaagaaaaaacataggagacgcccgtccaagaagaagcggcattggaaaccgtactacaagctgacctgggaagagaagaaaaagttcgacgagaaacagagccttcgagcttcaaggatccgagccgagatgttcgccaagggccagccggtcgcgccctataacaccacgcagttcctcatggatgatcacgaccaggaggagccggatctcaaaaccggcctgtactccaagcgggccgccgccaaatccgacgacaccagcgatgacgacttcatggaagaagggggtgaggaggatgggggcagcgatgggatgggaggggacggcagcgagtttctgcagcgggacttctcggagacgtacgagcggtaccacacggagagcctgcagaacatgagcaagcaggagctcatcaaggagtacctggaactggagaagtgcctctcgcgcatggaggacgagaacaaccggctgcggctggagagcaagcggctgggtggcgacgacgcgcgtgtgcgggagctggagctggagctggaccggctgcgcgccgagaacctccagctgctgaccgagaacgaactgcaccggcagcaggagcgagcgccgctttccaagtttggagactagactgaaacttttttgggggagggggcaaaggggactttttacagtgatggaatgtaacattatatacatgtgtatataagacagtggacctttttatgacacataatcagaagagaaatccccctggctttggtttcgtaaatttagctatatgtagcttgcgtgctttctcctgttcttttaattatgtgaaactgaagagttgcttttcttgttttcctttttagaagtttttttccttaatgtgaaagtaatttgaccaagttataatgcatttttgtttttaacaaatcccctccttaaacggagctataaggtggccaaatctgagaacaattaaattcattttagttataataaatttaatatttgtaaatgtaacatagtttcagtgtgatttctagagctaattcaaaatagtattgatatattttatgtgactgcatttttggggaggggtaccgaaatcgttaaatttgtcagtttgcaaaaatatcaatctttaatgggagaattttcaatttgccaattttttccttgaatgggtttaagtatgctacaatatacagttcaggcaaaatttaagatgtaattatcttcaatacttaagtgtgcttgctttctagtgccttggttttctttcttgatgctggaaaaataaacaaaccggtattgagtgtttaggcgagtggaaagtggctacaatccaaaattttaaatttaactctgcctcggccattcaaaagtctaataacaaaaaatgtaaacctaatttggcagtttgttaggttagacaactgacagcctcatttcattcctacaagttggttttcagtaatctcttccttccccccagtaaggctggaagaggctcttggcaaacttcttagtgcaagcaatggttagattaatttgtgaggcagctctttaagacgttcagaggtaagaaatactggatttataaagcaaatggctgtttgggggattccaaggatttacctaattgtccaattctacgtgctctctataccaaaacaaaaaaaaaaagctatccacctttccatgtgggtcaaactaaaattagaaatgtcccctcactgcagatcaaatgtaaagcttccagttaaggagctaaatgaggtcctcagctgaatgaggaaccctgtacatccccttgcacagccctattctaaatcgcttaaactatgctgatagctgcttaggttcttgagtagttctgctcttaaacgtagggaggccctgagaactaaattttgccccaaaataaaaacagaaattatgagattgcctcctgtcattttggttaacccagtccttcacctgccctgtgtcagtgtcttctgagggcaattgcgttgctcaaatcactagcacagaggttccttaatttggggccttagaaaccattgtgggccttggggtccatgaaccccatgaaattatttgtagacttgtatgtacatttttctggggagaaggttcaagagattcataagattgtcaaactccttgaaggttcagaacctctgcagggaagggggaagaaaaccctcccattaggaagcatgcttttgcagttaaatggcgatggtggaggtgatagggacttcaagagtaaaatgcaccttgtattgcataagaagcatacacaaatcaataaatcaagggagattataccagtaggactgaatcagggccttcaaagctggactgagttggtcctgttctggcacatatggtccactggagacaatgtatgattgagtttttctttggtctaaaaattatattaaacatttattttgaaata

SEQ ID NO: 22 - DNA, 3891 bp, Homo sapiens
gagagcgtagtggaggaggcgcggttgtgagtagtaccgggagtggggtgatcccgggctaggggagcgcggcggccgcgatcgggcttagtcggagctccgaagggagtgactaggacacccgggtgggctacttttcttccggtgcttttgctttttttttcctttgggctcgggctgagtgtcgcccactgagcaaagattccctcgtaaaacccagagcgaccctcccgtcaattgttgggctcgggagtgtcgcggtgccccgagcgcgccgggcgcggaggcaaagggagcggagccggccgcggacggggcccggagcttgcctgcctccctcgctcgccccagcgggttcgctcgcgtagagcgcagggcgcgcgcgatgaaggcggtgagcccggtgcgcccctcgggccgcaaggcgccgtcgggctgcggcggcggggagctggcgctgcgctgcctggccgagcacggccacagcctgggtggctccgcagccgcggcggcggcggcggcggcagcgcgctgtaaggcggccgaggcggcggccgacgagccggcgctgtgcctgcagtgcgatatgaacgactgctatagccgcctgcggaggctggtgcccaccatcccgcccaacaagaaagtcagcaaagtggagatcctgcagcacgttatcgactacatcctggacctgcagctggcgctggagacgcacccggccctgctgaggcagccaccaccgcccgcgccgccacaccacccggccgggacctgtccagccgcgccgccgcggaccccgctcactgcgctcaacaccgacccggccggcgcggtgaacaagcagggcgacagcattctgtgccgctgagccgcgctgtccaggtgtgcggccgcctgagcccgagccaggagcactagagagggagggggaagagcagaagttagagaaaaaaagccaccggaggaaaggaaaaaacatcggccaacctagaaacgttttcattcgtcattccaagagagagagaggaaagaaaaatacaactttcattctttctttgcacgttcataaacattctacatacgtattctcttttgtctcttcatttataactgctgtgaattgtacatttctgtgttttttggaggtgcagttaaacttttaagcttaagtgtgacaggactgataaatagaagatcaagagtagatccgactttagaagcctactttgtgaccaaggagctcaatttttgttttgaagctttactaatctaccagagcattgtagatattttttttttacatctattgtttaaaatagatgattataacggggcagagaactttcttttctctgcaagaatgttacatattgtatagataaatgagtgacatttcataccatgtatatatagagatgttctataagtgtgagaaagtatatgctttaatagatactgtaattataagatatttttaattaaatatttttttgtaaatattatgtgtgtgtttttttttaatctatgggaatatttcttttggaaaatcatttttcagctcaattacagagctcttgatatcttgaatgtcttttctgtttggcctggctcttaatttgcttttgttttgcccagtatagactcggaagtaacagttatagctagtggtcttgcatgattgcatgagatgtttaatcacaaattaaacttgttctgagtccattcaaatgtgtttttttaaatgtagattgaaatctttgtatttgaagcatacatgttgaaaatacaccttatcagtttttaagtacagggttttatagtgtaatatatacagagtaagtgtttgtttttgtttttcaactgaggtcaaaatggattctgaatgattttgcatatgggatgaggaaatgcttggatccttaaggagtttacgaaatctgctgttttatcaaagtgaaaaaaaattgcttattactcttcattttacactaaagcttaatgtcactaagtttcatgtctgtacagattatttaaatcatggaaatgaaaaaaatgttctctgcttgctaccaaaggacaaactcttggaaatgaacactttctgctttccttcctccaaagaattaataggcaacagtgggagaaaaaaaaggcataatggcaaatccttcaagcagggataaaagtcgatcttcaaacattaacttaagcagaccaaaaattctgatgaccgcatctagattatttttttataaaaatgattttcactatagctatgttacgctaagctactgtccaatctcttgtgatgtgtaacttttacatgtgaatattaaagtagatttctctgtcttgtactgtgatttctggtctcatttctttaaaaccttactcttatttttcttttaaggctcttttttctccttaaggaaggtaatattttctaggttagataggactatcagggtttgtgaacattatgcatttaatgttatgggtactttacacacaagttagatggaatttttagagtgaaagaattaagtaggatttaattgggtgctttgtaaatagtcaactgtgtgtataacgtggtctgtttgatttttaaaaggaaaggatttgtttcagattatacaagaataaaagtattatagacccaagggacttcttatgaggtcaaattcagatatttatatgaatatgaaataccatggtccctagtagtcagttgaagtggcaatgtctaaacagaaatgaacaaaactaatgctagcaggttaaaatcaatcaaaatgtttaaaaattgattctgtcctcagcatgttatttcctcagctctgataatttactggtcttgagtattttgagaatttgatgttgaacgttataaagtcaaagaactgcttgtttagatgaggtttatttttatttttgatattattcattcttgtcacacatcaagaagaaaacactagagtgctgctggaattccaaatctgaagaattctaacgactgcattctttgttattaaaaagggcacaatccttcctttttatttggcagtttaatttcagtaggaagcatgtcacatgtgcactgttggttagaattatgcatctgtcatgcctgactgctgaaccctacctaagccttttggcgcagtttaaaacttatactggtggactgtgaacctcaaaacaaatgggtatttttgggttttgaggatagatgttactccttaaagtttgtatttggggcatgaaaaactactgaaagaagaaaagtgctacagatactacatttcaaagagttggcattttccctttggccactcaagcagcatttgatgtatctaaagaaacaaagtcattgtttattttttaaaaaattatatgcagttgtacaagatactacattccattgaaatgttggctatgtcctaaccaggcaaccagataacaaaaacattttgagtcttttatctaggtagttctaattattcagctacttagtttaacaaaggaaaatatcctgacttctctcatttcatttgtagacttttcattgtataggcacaaccaaagagtcagactggtttaaaactccagaaggaaaaaaagtatcccacacagtggatgttgtttctaagaatgctacaaaatcctgacatctcagacatctcaatgttaaaggaagaaaaaaaataccttttcatttcaaagaactaatatactttgatattgtgtaaaccttactcaagtttattgtcaagctttaactgcctttttagaactttttaaaatttcgagcccacaaatctattgtattagttgccttctataacaataaatcttcactgagcaaaaggcaaaaaaaaaaaaaaa

SEQ ID NO: 23 - DNA, 1679 bp, Homo sapiens
ggatcttcaaaccgtgggagtggtgcggcggctagagtccctggactcctcaacctagggagctactcgcgagatgcctacgacttgtaacgggctgcctggtaaaatgagtctatggaaacggttgccagggccggctaacagcggctcccggaagtcctttgatgctttgttaacagtgaagctactggaccaatgaggtgcttcttccggttttgtccgcgctcgcctaattcttctttatcaaggttgcctttgaccccggaaaagagatcttccgggttcctctctccccaagatggctgctgaggacgagttacagctgccgcggctccccgagctgttcgaaactggtagacagttactggacgaagtagaagtggcgactgaacccgccggttcccggatagtccaggagaaggtgttcaagggcttggacctccttgagaaggctgccgaaatgttatcgcagctcgacttgttcagccgaaatgaagatttggaagagattgcttccaccgacctgaagtaccttttggtgccagcgtttcaaggagccctcaccatgaaacaagtcaaccccagcaagcgtctagatcatttgcagcgggctcgagaacactttataaactacttaactcagtgccattgctatcatgtggcagagtttgagctgcccaaaaccatgaacaactctgctgaaaatcacactgccaattcctccatggcttatcctagtctcgttgctatggcatctcaaagacaggctaaaatacagagatacaagcagaagaaggagttggagcataggttgtctgcaatgaaatctgctgtggaaagtggtcaagcagatgatgagcgtgttcgtgaatattatcttcttcaccttcagaggtggattgatatcagcttagaagagattgagagcattgaccaggaaataaagatcctgagagaaagagactcttcaagagaggcatcaacttctaactcatctcgccaggagaggcctccagtgaaacccttcattctcactcggaacatggctcaagccaaagtatttggagctggttatccaagtctgccaactatgacggtgagtgactggtatgagcaacatcggaaatatggagcattaccggatcagggaatagccaaggcagcaccagaggaattcagaaaagcagctcagcaacaggaagaacaagaagaaaaggaggaagaggatgatgaacaaacactccacagagcccgggagtgggatgactggaaggacacccatcctaggggctatgggaaccgacagaacatgggctgatcttcccacaacaccacaggactgcagggtgcacaactcccctgccaaggaaaaccatgcagtcctcccctccctggtctcctgcttcagctctgtacaacgagggcaaagatgctaaatcttgctttgcattcagtaaagtgtcaagtgattaagtgtgtatttgtaccctagatgatatgaaccagcagtcttgttttggcatcatcctcatcatgttgtattccagcttcttaagtggaaggaaaagagtgctgagaaatggctctgtataatctatggctatccgaattctctgaaaaaataataaaagtcccctctattatatgagcctgtacagaaaaaaaaaaaaaaaaaaaaa

SEQ ID NO: 24 - DNA, 4140 bp, Homo sapiens
gaagccagaggctgggggagctgctggagcctcgcgaagccgcggccggcgccctgcgccgtcgccgccgcctgctagtttcctccgggttctcagccccgggtactgaggcttcggtctataaatagcaggttacagctcctcctgggcgcgcacacgctcacacgctcgcaagcgaacgcaggaaagtcaggctaaaagtgtctgctgctgctgccgccccccactccgcctccgggagagaatacaaagaaatggtgttacctggcaagaggtcttctgtcttttatgaaaaattagacaaaggctttacaggaggcatagtactggaaatctgctcctgatgaggtctcagaaagcttccactcgtggtggaaggcaaaggaggagcaggcacatcacatgagccttgaaaccagcgaaacaataatcaaagagcagttctgtcaaagaaaacaacataaatcaggtacagaatttcagagtgggatatcagatctttagtgtgaagatacatctacattaaaccaggaatcactagaactgacatttggacaagaaaatttggaaaattttaaaactgtgaaggttgatcatggaaattaaagaggaaggggcatcagaagaagggcagcactttcttcctacagcccaggccaatgatcccggggactgtcagttcacaagtatccagaagactccaaatgaaccgcagttggaattcatccttgcatgcaaggatctcgtggctcctgtccgtgatcgtaaactgaatacactggtgcagatctccgtaatccaccccgtggagcagagtctgacaagatactccagcaccgaaattgtggagggaacaagggacccactgtttttgactggtgtcacattcccatctgagtatcccatctatgaggagaccaaaataaaactaacagtctatgatgtcaaggataagtctcatgacaccgttcgaaccagtgtcctaccagaacataaggatcccccgccagaagttgggcgaagtttcttgggctatgccagttttaaagtgggagagctgctgaagtcaaaggagcaattgctggtcctgagcctgagaacttcagatggtggcaaagtggttggcaccatagaagtcagtgtcgtgaagatgggggagattgaggatggggaagccgaccacatcaccacagatgtacagggacaaaagtgtgccctggtatgtgaatgtacagccccggaaagtgtgagcggaaaagataacttaccttttttgaattcagtgttaaagaacccagtatgtaaattatatagatttcccacatctgacaataagtggatgcgaattcgagagcagatgtcagagagcattctttcctttcatattcctaaggaattgatttcccttcacattaaagaagatttgtgcagaaaccaggagataaaagaacttggtgagctttctccacattgggacaatctgcgaaaaaatgtccttactcactgtgatcaaatggtgaatatgtaccaagacattctgacagaacttagcaaggaaacagggtcctctttcaaatcaagcagcagcaaaggagagaaaacattagaatttgttccaataaatctacatctgcaaagaatgcaggtacacagccctcacttgaaagatgctctctacgatgtcatcactgtgggagccccagctgcccattttcagggatttaagaatggtggtcttcggaagctactccatagatttgaaacagaaagaagaaataccggataccagtttatttactattcacctgaaaacacagccaaagcaaaggaagttctcagcaacatcaatcaactacaacctcttatagcaacccatgcagacctactgcttaattctgcaagccagcattctccagacagcttgaagaattctttaaagatgctttcagaaaaaacagagctttttgtacatgccttcaaggatcaacttgtcaggagtgctcttttagcactctacactgcaaggccaggaggcattcttaagaagccaccctctcctaagagcagcacagaggagagcagtccccaagaccaacccccagtgatgagagggcaggactccataccacatcattcagactatgatgaggaagagtgggacagggtgtgggccaatgtggggaagagcctgaactgcattattgctatggtggacaaactgattgaaagagatggtggcagtgaaggcagtggcggcaacaatgatggagaaaaggaaccttcattaacagatgccattccctctcacccaagagaggactggtatgaacagttgtatcccctcatccttaccctgaaggactgcatgggagaagtggtgaaccgagccaagcagtccctgacatttgtgctccttcaggaacttgcgtacagcttgccccagtgtctgatgctgacgctaagaagagacatcgtcttcagccaagcacttgctggattggtttgtggttttatcatcaaattacagacaagtctgtatgacccaggcttcctacagcagcttcacacagtggggttgatagtacaatatgaaggactgctaagtacatacagcgatgaaattggaatgctagaggacatggccgttggcatttccgatttaaagaaagttgcatttaaaataattgaagccaaatccaatgatgtgttgccagttataacaggaagacgagaacattacgtggtagaggtcaagcttccagccagaatgtttgagtcactacctctacagattaaagaaggacagttgcttcatgtgtatccagtactttttaatgttggaatcaatgaacagcaaactctggctgaaaggtttggagatgtctctttgcaagaaagtattaatcaggaaaacttcgaacttctacaagaatattacaagatatttatggaaaagatgcctcctgattatatttcacattttcaggaacaaaatgatttaaaagcattgctagaaaatctccttcaaaatatccaatccaaaaaaagaaagaatgtagaaattatgtggctggctgcaacgatttgccgcaaactgaatggtattcgtttcacctgttgtaaaagtgccaaagacaggacatcgatgtcagtgacacttgaacaatgctcaatcttgagagatgagcaccagttacacaaggacttctttatccgagcgctggattgcatgagaagagaaggatgccgcatagagaatgtactgaagaatatcaaatgcagaaagtatgctttcaacatgctacagctgatggctttccccaagtactacagacctccagaggggacttatggaaaagctgacacctaagtttaccaacatgttaataaacaggaacacaaatacatttcagttggataatcttcaccttggtcttttttgtttgtttttattgtcatgaatttgtggtgggggagatgatcacagatgtttcccaaaatctaggaactacttcaattcatcatcagcatattgctctgaaagaaatccattttaaaaaatcttacatgattcagtactgtcatttctagttctaagcttctatgtgttgagcctagctgattgagattggttcacaaagtgtaaatttcattcatgagtatttaaatgtttctgaggaaacatggatcatttcaataggactaggggtgattcacagagcaccactctccaaccaaatggaagagaggagagggggaaaaggaacatattttttttgtgatacaacttaatagcctatgagaacacagtcaacctgagaatcaatgtaagggatttaaaaaaaatgtgtagccactcaattaggtagagttaactcatgatctggaatactgaggcagtttgcaggtatgttccacaatgatctctatcatccagtcaaggtgtgactcctcccttgcaacaggcatatgcatggagtgagtaaagtggtcaacagacctttcaaaaccatggcatcttttcagaactctgacttgggttgtgtgatctagctgtgaatgtagcaatatagaacgtttaatagaatgataagcaaaacactgcaatgatctaaaattacaaaaaaaaaaaaaaaaaaa

SEQ ID NO: 25 - DNA, 3272 bp, Homo sapiens
gcgtcaggccctcttccccgggcgtggcctaagcggcccggtccagtcgccctggggctgcttgggggcttttcctgctcgtggagctctgcgctggtcttcatgcgccctagccctctttcggggatactggccgaccccctcttccttttcccctttagtgaaggcctcccccgtcgccgcgcggcttcccggagccgactgcagactccctcagcccggtgttccccgcgtccggacgccgaggtcgcggcttcgcagaaactcgggcccctccatccgccctcagaaaagggagcgatgttgatctcaggaagcacaaagggaccttcctagctctgactgaaccacggagctcaccctggacagtatcactccgtggaggaagactgtgagactgtggctggaagccagattgtagccacacatccgcccctgccctaccccagagccctggagcagcaactggctgcagatcacagacacagtgaggatatgagtgtaggggtgagcacctcagcccctctttccccaacctcgggcacaagcgtgggcatgtctaccttctccatcatggactatgtggtgttcgtcctgctgctggttctctctcttgccattgggctctaccatgcttgtcgtggctggggccggcatactgttggtgagctgctgatggcggaccgcaaaatgggctgccttccggtggcactgtccctgctggccaccttccagtcagccgtggccatcctgggtgtgccgtcagagatctaccgatttgggacccaatattggttcctgggctgctgctactttctggggctgctgatacctgcacacatcttcatccccgttttctaccgcctgcatctcaccagtgcctatgagtacctggagcttcgattcaataaaactgtgcgagtgtgtggaactgtgaccttcatctttcagatggtgatctacatgggagttgtgctctatgctccgtcattggctctcaatgcagtgactggctttgatctgtggctgtccgtgctggccctgggcattgtctgtaccgtctatacagctctgggtgggctgaaggccgtcatctggacagatgtgttccagacactggtcatgttcctcgggcagctggcagttatcatcgtggggtcagccaaggtgggcggcttggggcgtgtgtgggccgtggcttcccagcacggccgcatctctgggtttgagctggatccagacccctttgtgcggcacaccttctggaccttggccttcgggggtgtcttcatgatgctctccttatacggggtgaaccaggctcaggtgcagcggtacctcagttcccgcacggagaaggctgctgtgctctcctgttatgcagtgttccccttccagcaggtgtccctctgcgtgggctgcctcattggcctggtcatgttcgcgtattaccaggagtatcccatgagcattcagcaggctcaggcagccccagaccagttcgtcctgtactttgtgatggatctcctgaagggcctgccaggcctgccagggctcttcattgcctgcctcttcagcggctctctcagcactatatcctctgcttttaattcattggcaactgttacgatggaagacctgattcgaccttggttccctgagttctctgaagcccgggccatcatgctttccagaggccttgcctttggctatgggctgctttgtctaggaatggcctatatttcctcccagatgggacctgtgctgcaggcagcaatcagcatctttggcatggttgggggaccgctgctgggactcttctgccttggaatgttctttccatgtgctaaccctcctggtgctgttgtgggcctgttggctgggctcgtcatggccttctggattggcatcgggagcatcgtgaccagcatgggctccagcatgccaccctctccctctaatgggtccagcttctccctgcccaccaatctaaccgttgccactgtgaccacactgatgcccttgactaccttctccaagcccacagggctgcagcggttctattccttgtcttacttatggtacagtgctcacaactccaccacagtgattgtggtgggcctgattgtcagtctactcactgggagaatgcgaggccggtccctgaaccctgcaaccatttacccagtgttgccaaagctcctgtccctccttccgttgtcctgtcagaagcggctccactgcaggagctacggccaggaccacctcgacactggcctgtttcctgagaagccgaggaatggtgtgctgggggacagcagagacaaggaggccatggccctggatggcacagcctatcaggggagcagctccacctgcatcctccaggagacctccctgtgatgttgactcaggaccccgcctctgtcctcactgtgccaggccatagccagaggccaccctgtagtacagggatgagtcttggtgtgttctgcagggacaggcctggatgatctagctcataccaaaggaccttgttctgagaggttcttgcctgcaggagaagctgtcacatctcaagcatgtgaggcaccgtttttctcgtcgcttgccaatctgttttttaaaggatcaggctcgtagggagcaggatcatgccagaaatagggatggaagtgcatcctctgggaaaaagataatggcttctgattcaacatagccatagtcctttgaagtaagtggctagaaacagcactctggttataattgccccagggcctgattcaggactgactctccaccataaaactggaagctgcttcccctgtagtccccatttcagtaccagttctgccagccacagtgagcccctattattactttcagattgtctgtgacactcaagcccctctcatttttatctgtctacctccattctgaagagggaggttttggtgtccctggtcctctgggaatagaagatccatttgtctttgtgtagagcaagcacgttttccacctcactgtctccatcctccacctctgagatggacacttaagagacggggcaaatgtggatccaagaaaccagggccatgaccgggtccactgtggagcagccatctatctacctgactcctgagccaggctgccgtggtgtcatttctgtcatccgtgctctgtttccttttggagtttcttctccacattatctttgttcctggggaataaaaactaccattggacctagaaaaaaaaaaaaaaaaaaaaaa

SEQ ID NO: 26 - DNA, 482 bp, Homo sapiens
gcgggcgccgctcttttgtttcttgctgcagcaacgcgagtgggagcaccaggatctcgggctcggaacgagactgcacggattgttttaagaaaatggcagacaaaccagacatgggggaaatcgccagcttcgataaggccaagctgaagaaaacggagacgcaggagaagaacaccctgccgaccaaagagaccattgagcaggagaagcggagtgaaatttcctaagatcctggaggatttcctacccccgtcctcttcgagaccccagtcgtgatgtggaggaagagccacctgcaagatggacacgagccacaagctgcactgtgaacctgggcactccgcgccgatgccaccggcctgtgggtctctgaagggacccccccccaatcggactgccaaattctccggtttgccccgggatattatagaaaattatttgtatgaataatgaaaataaaacacacctcgtggcatggc

SEQ ID NO: 27 - DNA, 4120 bp, Homo sapiens
ggctgctggcggcctgggctgccggggccgacgcctgggtggctgctgccgccgcgcctgctgcgagatggcgatcttgggcgcggaagggtgagggcgcccgccgcaggaggaggtgccgctgccgtggccgcccggctgccgggagccgacagcttcgcgccggggttgtctcctcacagactatgagctccttgaaagagggaatcgtgtcttactcatctttgtatccccagtgtctagcagttcctgatacatagttttagctgaattttgggacatggccactgcttcaccaaggtctgatactagtaataaccacagtggaaggttgcagttacaggtaactgtttctagtgccaaacttaaaagaaaaaagaactggttcggaacagcaatatatacagaagtagttgtagatggagaaattacgaaaacagcaaaatccagtagttcttctaatccaaaatgggatgaacagctaactgtaaatgttacgccacagactacattggaatttcaagtttggagccatcgcactttaaaagcagatgctttattaggaaaagcaacgatagatttgaaacaagctctgttgatacacaatagaaaattggaaagagtgaaagaacaattaaaactttccttggaaaacaagaatggcatagcacaaactggtgaattgacagttgtgcttgatggattggtgattgagcaagaaaatataacaaactgcagctcatctccaaccatagaaatacaggaaaatggtgatgccttacatgaaaatggagagccttcagcaaggacaactgccaggttggctgttgaaggcacgaatggaatagataatcatgtacctacaagcactctagtccaaaactcatgctgctcgtatgtagttaatggagacaacacaccttcatctccgtctcaggttgctgccagacccaaaaatacaccagctccaaaaccactcgcatctgagcctgccgatgacactgttaatggagaatcatcctcatttgcaccaactgataatgcgtctgtcacgggtactccagtagtgtctgaagaaaatgccttgtctccaaattgcactagtactactgttgaagatcctccagttcaagaaatactgacttcctcagaaaacaatgaatgtattccttctaccagtgcagaattggaatctgaagctagaagtatattagagcctgacacctctaattctagaagtagttctgcttttgaagcagccaaatcaagacagccagatgggtgtatggatcctgtacggcagcagtctgggaatgccaacacagaaaccttgccatcagggtgggaacaaagaaaagatcctcatggtagaacctattatgtggatcataatactcgaactaccacatgggagagaccacaacctttacctccaggttgggaaagaagagttgatgatcgtagaagagtttattatgtggatcataacaccagaacaacaacgtggcagcggcctaccatggaatctgtccgaaattttgaacagtggcaatctcagcggaaccaattgcagggagctatgcaacagtttaaccaacgatacctctattcggcttcaatgttagctgcagaaaatgacccttatggacctttgccaccaggctgggaaaaaagagtggattcaacagacagggtttactttgtgaatcataacacaaaaacaacccagtgggaagatccaagaactcaaggcttacagaatgaagaacccctgccagaaggctgggaaattagatatactcgtgaaggtgtaaggtactttgttgatcataacacaagaacaacaacattcaaagatcctcgcaatgggaagtcatctgtaactaaaggtggtccacaaattgcttatgaacgcggctttaggtggaagcttgctcacttccgttatttgtgccagtctaatgcactacctagtcatgtaaagatcaatgtgtcccggcagacattgtttgaagattccttccaacagattatggcattaaaaccctatgacttgaggaggcgcttatatgtaatatttagaggagaagaaggacttgattatggtggcctagcgagagaatggtttttcttgctttcacatgaagttttgaacccaatgtattgcttatttgagtatgcgggcaagaacaactattgtctgcagataaatccagcatcaaccattaatccagaccatctttcatacttctgtttcattggtcgttttattgccatggcactatttcatggaaagtttatcgatactggtttctctttaccattctacaagcgtatgttaagtaaaaaacttactattaaggatttggaatctattgatactgaattttataactcccttatctggataagagataacaacattgaagaatgtggcttagaaatgtacttttctgttgacatggagattttgggaaaagttacttcacatgacctgaagttgggaggttccaatattctggtgactgaggagaacaaagatgaatatattggtttaatgacagaatggcgtttttctcgaggagtacaagaacagaccaaagctttccttgatggttttaatgaagttgttcctcttcagtggctacagtacttcgatgaaaaagaattagaggttatgttgtgtggcatgcaggaggttgacttggcagattggcagagaaatactgtttatcgacattatacaagaaacagcaagcaaatcatttggttttggcagtttgtgaaagagacagacaatgaagtaagaatgcgactattgcagttcgtcactggaacctgccgtttacctctaggaggatttgctgagctcatgggaagtaatgggcctcaaaagttttgcattgaaaaagttggcaaagacacttggttaccaagaagccatacatgttttaatcgcttggatctaccaccatataagagttatgaacaactaaaggaaaaacttctttttgcaatagaagagacagagggatttggacaagaatgaatgtggcttcttattttggaggagctcttgcatttaaataccccagccaagaaaaattgcacagatagtgtatataagctgttcattctgtacagtgaattttccgaacctctcaaagtatgttttccgttcttccacagaaatatgcaaaacagttcatccttttctactttatttattgttcccttgaaatgactgaccaggaaaaagatcatccttaaattttgaagcaagtgagagactttattaaaaatacatatatatctatataaacatatatgatagtggctctagttttatagagctccaagtgtattaaacatgacagccattcattcataaagatctggatttgctttaccttgttaatattatctaggggaaaaagtgcaaattgctccatgttcttctctcccttatgtaacatctcctgagggtgtttagttgcatggctgttcagaaaggtattaagggcttaggccaaatcttactttgagtatgttaaaaaaaaaaaaatgctgctggcttttctgaagacaggtgcttgaacttgtcagtttgttttaaataaatacaatagttgaaaatttttctctgttacatcagtaatattgttaaagtaatggatagaaccataacttacacatgaaagtcatatactagatccaatactatttagtttattatcgaaattggaaggattcattgagcagcatagaagtttgtttacatgttactttgagatgctaggtatttgtggaattaaaaagaatcaggctcttttgtactttgtttttaaatctgtgatgcttttcaaatttaattcataataaattgatgcaatttcatacttaggaacatacaaaaggtaatgtaaactctgccacttttttgtgttcaaaattttggtttttatgaagccagatggattgaagagttacataagcatttgaatgctctaatataaggctaatgattttctgttagtgtttgaatatcttcattcctctcaaattcataacagttctatttaactgaattaaataaccatatgaaaaaaaaaaaaaaaaa

SEQ ID NO: 28 - DNA, 3885 bp, Homo sapiens
aggccggggcggggctgggaagtagtcgggcggggttgtgagacgccgcgctcagcttccatcgctgggcggtcaacaagtgcgggcctggctcagcgcgggggggcgcggagaccgcgaggcgaccgggagcggctgggttcccggctgcgcgcccttcggccaggccgggagccgcgccagtcggagcccccggcccagcgtggtccgcctccctctcggcgtccacctgcccggagtactgccagcgggcatgaccgacccaccaggggcgccgccgccggcgctcgcaggccgcggatgaagaagaaaacccggcgccgctcgacccggagcgaggagttgacccggagcgaggagttgaccctgagtgaggaagcgacctggagtgaagaggcgacccagagtgaggaggcgacccagggcgaagagatgaatcggagccaggaggtgacccgggacgaggagtcgacccggagcgaggaggtgaccagggaggaaatggcggcagctgggctcaccgtgactgtcacccacagcaatgagaagcacgaccttcatgttacctcccagcagggcagcagtgaaccagttgtccaagacctggcccaggttgttgaagaggtcataggggttccacagtcttttcagaaactcatatttaagggaaaatctctgaaggaaatggaaacaccgttgtcagcacttggaatacaagatggttgccgggtcatgttaattgggaaaaagaacagtccacaggaagaggttgaactaaagaagttgaaacatttggagaagtctgtggagaagatagctgaccagctggaagagttgaataaagagcttactggaatccagcagggttttctgcccaaggatttgcaagctgaagctctctgcaaacttgataggagagtaaaagccacaatagagcagtttatgaagatcttggaggagattgacacactgatcctgccagaaaatttcaaagacagtagattgaaaaggaaaggcttggtaaaaaaggttcaggcattcctagccgagtgtgacacagtggagcagaacatctgccaggagactgagcggctgcagtctacaaactttgccctggccgagtgaggtgtagcagaaaaaggctgtgctgccctgaagaatggcgccaccagctctgccgtctctggagcggaatttacctgatttcttcagggctgctgggggcaactggccatttgccaattttcctactctcacactggttctcaatgaaaaatagtgtctttgtgattttgagtaaagctcctatctgttttctccttctgtctctgtggttgtactgtccagcaatccaccttttctggagagggccacctctgcccaaattttcccagctgtttggacctctgggtgctttctttgggctggtgagagctctaatttgccttgggccagtttcaggtttataggccccctcagtcttcagatacatgagggcttctttgctcttgtgatcgtgtagtcccatagctgtaaaaccagaatcaccaggaggttgcacctagtcaggaatattgggaatggcctagaacaaggtgtttggcacataagtagaccacttatccctcattgtgacctaattccagagcatctggctgggttgttgggttctagactttgtcctcacctcccagtgaccctgactagccacaggccatgagataccagggggccgttccttggatggagcctgtggttgatgcaaggcttccttgtccccaagcaagtcttcagaaggttagaacccagtgttgactgagtctgtgcttgaaaccaggccagagccatggattaggaagggcaaagagaaggcaccagaatgagtaaagcaggcaggtggtgaagccaaccataaacttctcaggagtgacatgtgcttccttcaaaggcatttttgttaaccatatccttctgagttctatgtttccttcacagctgttctatccattttgtggactgtcccccacccccaccccatcattgtttttaaaaaattaaggcctggcgcagcagctcatgcctataatcccagcactttgggaggctgaggcgggcggatcacttgaggccaggagtttgagaccagcccaggcaacatagcaaaaccccattctgctttaaaaaaaaaaaaaaaaaaaattagcttggcgtagtggcatgtgcctataatcccagctactggggaggctgaggcacaagaatcatttgaacctgggaggtagaggttgctgtgagccgagattacgcccctgcactccagcctgggtcacagagtgagactccatctcagaaaaaaaaaaaattgagtcaggtgcagtagctccttcctgtagtcccagctacttgggaggctgaggctagaggatcacttgagcccaggagtttgagtctagtctgggcaacatagcaagaccccatctctaaaatttaagtaagtaaaagtagataaataaaaagaaaaaaaaactgtttatgtgctcatcataaagtagaagagtggtttgcttttttttttttttttggattaatgaggaaatcattctgtggctctagtcataatttatgcttaataacattgatagtagccctttgcgctataactctacctaaagactcacatcatttggcagagagagagtcgttgaagtcccaggaattcaggactgggcaggttaagacctcagacaaggtagtagaggtagacttgtggacaaggctcgggtcccagcccaccgcaccccaactttaatcagagtggttcactattgatctatttttgtgtgatagctgtgtggcgtgggccacaacatttaatgagaagttactgtgcaccaaactgccgaacaccattctaaactattcatatatattagtcatttaattcttacataacttgagaggtagacagatatccttattttagagatgaggaaaccaagagaacttaggtcattagcgcaaggttgtagagtaagcggcaaagccaagacacaaagctgggtggtttggtttcagagccagtgcttttcccctctactgtactgcctctcaaccaacacagggttgcacaggcccattctctgatttttttcctcttgtcctctgcctctccctctagctcccacttcctctctgctctagttcattttctttagagcagcccgagtgatcatgaagtgcaaatcttgccatgtcagtcccctgcttagaaccctccaatggctcactttctctttaggcaaaagtctttaccccatgccttctcccatctcatctcaaccccctcatttgttggctgtctgctgtcagccactcttctttcaggtcctcagatgcactgcaccctctcctgcctgggggtctttgctcctgctactacctctgcttgaacagctcctcaccttccttcctccaaccctacccttgtataggtgacttttgttcatccttcagaattcaactcacatgtctcttgcatggagaaccctcacctactgtgttgagaccctgtccagcccccaggtgggatcctctctcgacttcccatacatttctttcacagcatttacatagtccatgatagtttacttgtgggattatttggttaatctttgcctttaacaccagggttccttgggtgaaggagcttctttatcttggtaacagcattatttcaagcataacttgtaatatagttatattacatatataacatatatatatataacataacatatataacatatataacaagcataacttgttatatagtcttgtatatagtaagacctcaataaatatttggagaacaaaaaaaaaaaaaaa

SEQ ID NO: 29 - DNA, 1266 bp, Homo sapiens
tgtcccctctccggagctcttatactctgagccctgctcggtttaggcctgtctgcggaatccgcaccaaccagcaccatgcccatgatactggggtactgggacatccgcgggctggcccacgccatccgcctgctcctggaatacacagactcaagctatgaggaaaagaagtacacgatgggggacgctcctgattatgacagaagccagtggctgaatgaaaaattcaagctgggcctggactttcccaatctgccctacttgattgatggggctcacaagatcacccagagcaacgccatcttgtgctacattgcccgcaagcacaacctgtgtggggagacagaagaggagaagattcgtgtggacattttggagaaccagaccatggacaaccatatgcagctgggcatgatctgctacaatccagaatttgagaaactgaagccaaagtacttggaggaactccctgaaaagctaaagctctactcagagtttctggggaagcggccatggtttgcaggaaacaagatcacttttgtagattttctcgtctatgatgtccttgacctccaccgtatatttgagcccaagtgcttggacgccttcccaaatctgaaggacttcatctcccgctttgagggcttggagaagatctctgcctacatgaagtccagccgcttcctcccaagacctgtgttctcaaagatggctgtctggggcaacaagtagggccttgaaggccaggaggtgggagtgaggagcccatactcagcctgctgcccaggctgtgcagcgcagctggactctgcatcccagcacctgcctcctcgttcctttctcctgtttattcccatctttactcccaagacttcattgtccctcttcactccccctaaacccctgtcccatgcaggccctttgaagcctcagctacccactatccttcgtgaacatcccctcccatcattacccttccctgcactaaagccagcctgaccttccttcctgttagtggttgtgtctgctttaaagggcctgcctggcccctcgcctgtggagctcagccccgagctgtccccgtgttgcatgaaggagcagcattgactggtttacaggccctgctcctgcagcatggtccctgccttaggcctacctgatggaagtaaagcctcaaccacaaaaaaaaaaaaaaaaaaaaaaaaaaaaaaaaaaaaaaaaaaaaaaaaaaaaaaaaaaaaaaaaaaaaaaaaaaaaaaaaaa

SEQ ID NO: 30 - DNA, 2276 bp, Homo sapiens
aagcccagcagccccggggcggatggctccggccgcctggctccgcagcgcggccgcgcgcgccctcctgcccccgatgctgctgctgctgctccagccgccgccgctgctggcccgggctctgccgccggacgcccaccacctccatgccgagaggagggggccacagccctggcatgcagccctgcccagtagcccggcacctgcccctgccacgcaggaagccccccggcctgccagcagcctcaggcctccccgctgtggcgtgcccgacccatctgatgggctgagtgcccgcaaccgacagaagaggttcgtgctttctggcgggcgctgggagaagacggacctcacctacaggatccttcggttcccatggcagttggtgcaggagcaggtgcggcagacgatggcagaggccctaaaggtatggagcgatgtgacgccactcacctttactgaggtgcacgagggccgtgctgacatcatgatcgacttcgccaggtactggcatggggacgacctgccgtttgatgggcctgggggcatcctggcccatgccttcttccccaagactcaccgagaaggggatgtccacttcgactatgatgagacctggactatcggggatgaccagggcacagacctgctgcaggtggcagcccatgaatttggccacgtgctggggctgcagcacacaacagcagccaaggccctgatgtccgccttctacacctttcgctacccactgagtctcagcccagatgactgcaggggcgttcaacacctatatggccagccctggcccactgtcacctccaggaccccagccctgggcccccaggctgggatagacaccaatgagattgcaccgctggagccagacgccccgccagatgcctgtgaggcctcctttgacgcggtctccaccatccgaggcgagctctttttcttcaaagcgggctttgtgtggcgcctccgtgggggccagctgcagcccggctacccagcattggcctctcgccactggcagggactgcccagccctgtggacgctgccttcgaggatgcccagggccacatttggttcttccaaggtgctcagtactgggtgtacgacggtgaaaagccagtcctgggccccgcacccctcaccgagctgggcctggtgaggttcccggtccatgctgccttggtctggggtcccgagaagaacaagatctacttcttccgaggcagggactactggcgtttccaccccagcacccggcgtgtagacagtcccgtgccccgcagggccactgactggagaggggtgccctctgagatcgacgctgccttccaggatgctgatggctatgcctacttcctgcgcggccgcctctactggaagtttgaccctgtgaaggtgaaggctctggaaggcttcccccgtctcgtgggtcctgacttctttggctgtgccgagcctgccaacactttcctctgaccatggcttggatgccctcaggggtgctgacccctgccaggccacgaatatcaggctagagacccatggccatctttgtggctgtgggcaccaggcatgggactgagcccatgtctcctcagggggatggggtggggtacaaccaccatgacaactgccgggagggccacgcaggtcgtggtcacctgccagcgactgtctcagactgggcagggaggctttggcatgacttaagaggaagggcagtcttgggcccgctatgcaggtcctggcaaacctggctgccctgtctccatccctgtccctcagggtagcaccatggcaggactgggggaactggagtgtccttgctgtatccctgttgtgaggttccttccaggggctggcactgaagcaagggtgctggggccccatggccttcagccctggctgagcaactgggctgtagggcagggccacttcctgaggtcaggtcttggtaggtgcctgcatctgtctgccttctggctgacaatcctggaaatctgttctccagaatccaggccaaaaagttcacagtcaaatggggaggggtattcttcatgcaggagaccccaggccctggaggctgcaacatacctcaatcctgtcccaggccggatcctcctgaagcccttttcgcagcactgctatcctccaaagccattgtaaatgtgtgtacagtgtgtataaaccttcttcttctttttttttttttaaactgaggattgtcattaaacacagttgttttctaaaaaaaaaaaaaaaa

SEQ ID NO: 31 - DNA, 1872 bp, Homo sapiens
ttaattacaaaaactaatgactaagagagaggtggctagagctgaggcccctgagtcaggctgtgggtgggatcatctccagtacaggaagtgagactttcatttcctcctttccaagagagggctgagggagcagggttgagcaactggtgcagacagcctagctggactttgggtgaggcggttcagccatgaggctggctgtgcttttctcgggggccctgctggggctactggcagcccaggggacagggaatgactgtcctcacaaaaaatcagctactttgctgccatccttcacggtgacacccacggttacagagagcactggaacaaccagccacaggactaccaagagccacaaaaccaccactcacaggacaaccaccacaggcaccaccagccacggacccacgactgccactcacaaccccaccaccaccagccatggaaacgtcacagttcatccaacaagcaatagcactgccaccagccagggaccctcaactgccactcacagtcctgccaccactagtcatggaaatgccacggttcatccaacaagcaacagcactgccaccagcccaggattcaccagttctgcccacccagaaccacctccaccctctccgagtcctagcccaacctccaaggagaccattggagactacacgtggaccaatggttcccagccctgtgtccacctccaagcccagattcagattcgagtcatgtacacaacccagggtggaggagaggcctggggcatctctgtactgaaccccaacaaaaccaaggtccagggaagctgtgagggtgcccatccccacctgcttctctcattcccctatggacacctcagctttggattcatgcaggacctccagcagaaggttgtctacctgagctacatggcggtggagtacaatgtgtccttcccccacgcagcacagtggacattctcggctcagaatgcatcccttcgagatctccaagcacccctggggcagagcttcagttgcagcaactcgagcatcattctttcaccagctgtccacctcgacctgctctccctgaggctccaggctgctcagctgccccacacaggggtctttgggcaaagtttctcctgccccagtgaccggtccatcttgctgcctctcatcatcggcctgatccttcttggcctcctcgccctggtgcttattgctttctgcatcatccggagacgcccatccgcctaccaggccctctgagcatttgcttcaaaccccagggcactgagggggttggggtgtggtgggggggtacccttatttcctcgacacgcaactggctcaaagacaatgttattttccttccctttcttgaagaacaaaaagaaagccgggcatgacggctcatgcctgtaatcccagcactttgggaggctgaggcaggtggatcactggaggtcaggagtttgagaccagcctggccaacatggtgaaaccctgtctctactaaaaatacaattagccaggtgtggcggcgtaatcccagctggcctgtaatcccagctacttgggaggctgaggcagaactgcttgaacccaggaggtggaggttgcagtgagccgtcatcgcgccactaagccaagatcgcgccactgcactccagcctgggcgacagagccagactgtctcaaataaataaatatgagataatgcagtcgggagaagggagggagagaattttattaaatgtgacgaactgccccccccccccccccagcaggagagcagcaaaatttatgcaaatctttgacggggttttccttgtcctgccaggattaaaagccatgagtttcttgtcaaaaaaaaaaaaaaaaa

SEQ ID NO: 32 - DNA, 748 bp, Homo sapiens
ggccgcgatgagcggggagccggggcagacgtccgtagcgccccctcccgaggaggtcgagccgggcagtggggtccgcatcgtggtggagtactgtgaaccctgcggcttcgaggcgacctacctggagctggccagtgctgtgaaggagcagtatccgggcatcgagatcgagtcgcgcctcgggggcacaggtgcctttgagatagagataaatggacagctggtgttctccaagctggagaatgggggctttccctatgagaaagatctcattgaggccatccgaagagccagtaatggagaaaccctagaaaagatcaccaacagccgtcctccctgcgtcatcctgtgactgcacaggactctgggttcctgctctgttctggggtccaaaccttggtctccctttggtcctgctgggagctccccctgcctctttcccctacttagctccttagcaaagagaccctggcctccactttgccctttgggtacaaagaaggaatagaagattccgtggccttgggggcaggagagagacactctccatgaacacttctccagccacctcatacccccttcccagggtaagtgcccacgaaagcccagtccactcttcgcctcggtaatacctgtctgatgccacagattttatttattctcccctaacccagggcaatgtcagctattggcagtaaagtggcgctacaaacactaaaaaaaaaaaaaaaaaaaaaaaaaaaaa

SEQ ID NO: 33 - DNA, 963 bp, Homo sapiens
aatgaggagtgatcatggctacctcagagctgagctgcgaggtgtcggaggagaactgtgagcgccgggaggccttctgggcagaatggaaggatctgacactgtccacacggcccgaggagggctgctccctgcatgaggaggacacccagagacatgagacctaccaccagcaggggcagtgccaggtgctggtgcagcgctcgccctggctgatgatgcggatgggcatcctcggccgtgggctgcaggagtaccagctgccctaccagcgggtactgccgctgcccatcttcacccctgccaagatgggcgccaccaaggaggagcgtgaggacacccccatccagcttcaggagctgctggcgctggagacagccctgggtggccagtgtgtggaccgccaggaggtggctgagatcacaaagcagctgccccctgtggtgcctgtcagcaagcccggtgcacttcgtcgctccctgtcccgctccatgtcccaggaagcacagagaggctgagagggactgtgacttgggctccgctgtgcccgccctgggctgggcccttcctggctaggactgtggaggggagctgctggccatggctgctttgtagtttgcccagagttgggggctaggggaggggggagccagaggccaggatgcctgagccccctgagttcccaaagggagggtggcagagacagtgggcactaagggtggagagttgggggccagcacagctgaggaccctcagccccaggagaagggacaaaaggtactggtgagggcaagaggtgcctgggaggagtggccctgatccaggaaaatgtgaggggaatctggaacgctctaggcagaagaagctgggagggagggggaggtgaaaagggcagaggcaaggatggtggggcccccagcaccctctgttagtgccgcaataaatgctcaatcatgtgccaga

SEQ ID NO: 34 - DNA, 4054 bp, Homo sapiens
atgcctgttgtgtggccaacccttctggatctcagcagggatgaatgcaaaagaattcttcgaaaattggaattggaggcatatgctggagttatcagtgcacttcgggcacagggggatctcaccaaggaaaagaaagatcttcttggagaactatcaaaagttcttagcatctcaacagaacgccaccgtgctgaagttcggagagcagtaaacgatgaacggttaacaacaattgcacataatatgtctggacctaatagctcttcagaatggtccattgaaggtcgtcgattggtaccactgatgccccggctcgttccccaaaccgcctttactgtaacagctaatgctgttgctaatgcagctatccagcataatgcatctcttccagtgcctgcagaaacaggaagcaaggaagtggtttgctattcctacacaagtaccacgtcaaccccaacctctacccctgttccaagtggcagcatagcaacggttaagtctccaagacctgccagtcctgcctccaatgtagttgtcttgccaagtggaagtactgtttatgtcaaaagtgtaagctgttcagatgaagatgaaaaacccagaaaacgaaggcgaacaaactcttccagctcctctcctgttgttctaaaggaagttccaaaggccgttgttccagtctcaaagacgatcactgtgcctgtgagtggtagtcccaagatgagcaacatcatgcagagcattgccaactccttaccaccccacatgtctcctgtaaaaataaccttcactaaaccatcaacacagacaacaaacacaacaacacagaaggttattatagtcaccacatcaccaagctcaaccttcgtgcccaacattctctccaaatcccataactatgcagcagtcactaagcttgtaccaacgtcagtcattgcttctacaacccagaagccaccagttgttataactgcttcacagtcctctctggtcagtaatagcagcagtggcagcagcagttctacaccatcacctattcctaatacagttgcagtaacagctgtggtgtcctctacaccatctgtggtcatgtcaacagtagcacaaggtgtatctacatcagcaatcaaaatggcatcaaccagacttccttcccccaaaagcttagtgagtgccccaactcagattcttgcacagttccctaaacaacatcaacagtctcctaagcagcagttatatcaagtgcaacagcagacacagcaacaagtggcccagccttctccagtatctcatcagcaacagcctcagcagtctcctttgccacctggtattaaacctaccatccaaatcaaacaggagtcaggtgttaaaatcatcacacaacaggttcaaccaagtaaaatcttacccaaaccagtgacagcaactctacccaccagtagcaattcccctattatggtggttagcagtaatggtgcaattatgacaactaaactggtaaccactcctactggcacacaagcaacctatacccggccaacagtgagcccatccattggtcggatggctgcaacccctggagctgcaacctatgtgaaaactacgagtggtagcatcattacagtagtacccaaatcattagctaccttggggggcaagataattagcagtaatatagtttctggaacgactaccaaaatcactacaatcccaatgacttccaagcccaacgtgattgttgtacaaaagactacaggaaaaggaacgaccattcaaggcctcccgggcaaaaatgttgtcacaacgttgctaaatgctggaggagaaaagactattcagacagtgccaacaggagcaaagccagctatccttactgctacaagacccatcaccaaaatgattgtaacgcagccaaaaggaataggttctacagttcaaccagcagctaaaatcatcccaacaaaaattgtttatgggcagcaagggaaaacgcaggttcttattaaacccaaaccagtgacttttcaagcgacagttgttagtgaacaaacaagacagctagtaacagaaacattacagcaagcatccagggtagcagaggctggtaattcatctattcaggaaggaaaagaagaaccacagaattatacagatagtagttcctcttctacagagtcctcccagagttcccaagattcccagcctgtagttcatgtaattgcttcccggcgtcaggattggtcagaacatgagattgcaatggagactagccctaccataatttatcaggatgtatccagtgaatcacaatccgctacttcaacaatcaaagctctgttagaactccaacagacaacagtaaaggaaaaattggaatctaaaccaagacaacccactattgacctgagtcaaatggcagtgcctattcagatgacccaggaaaagagacattctcctgagagtccatcaattgctgtggtagagtcagaactagtagctgaatacatcactactgaacgcactgatgaggggacagaggttgcttttccccttctagtcagccatcgctcccagccccaacagccttcccagccccagcggaccctgctccagcatgtggctcagtcacagaccgcaacacagacttcggtggtggtgaagtccatcccagcatcttcccctggagcaatcacccacattatgcagcaggcattaagcagtcacactgcttttaccaaacacagcgaggaacttggaactgaggagggcgaggttgaagagatggacactttagaccctcagacaggtctgttttaccgatctgccctgactcagtcacagtcagctaaacagcagaaacttagccagcccccgctggaacagactcagctgcaagtgaaaactctgcagtgcttccagactaaacagaagcagaccatccacctgcaggcagaccagctccagcacaaactcccgcaaatgccccagctttccatcaggcatcaaaaactcacccctctccagcaagaacaagcacagcccaagccagatgtacagcacacacagcatcccatggtggccaaagacaggcagcttcctaccttaatggcacagcccccgcaaactgtagtacaggtgcttgcagtgaaaaccacgcagcagctccctaaactgcagcaggctccgaaccaaccaaaaatctacgtgcaaccccaaaccccccagagccaaatgtcgctcccagcttcttcagagaaacagacggcaagccaggtggagcagccaattataacccaaggatcctctgttacaaagataacttttgaggggcgccagcctcccacagttacaaagataactggtggcagttctgtgcctaagctgacatcaccagttacaagcatatctcccattcaggcctctgagaagacagcagtgtctgacattttgaaaatgtctttgatggaagctcagattgatacaaatgtagaacatatgatagtggatcccccaaagaaggctcttgccactagcatgctcactggtgaagcaggatcattaccctccacccacatggtggtggcagggatggcgaattccactccccagcaacagaaatgtagagagtcctgttcgagtccatccactgttggctcttccctaacgacaaggaaaattgatccaccagcagtgcctgcgacaggccagttcatgcgtattcagaatgtaggccaaaagaaagctgaagagagtccagcagaaattatcatccaggctattcctcagtatgctattccttgtcactccagctccaatgtggtggtggagcccagtgggcttcttgagctaaacaacttcactagtcaacagctggatgatgaggagacagcaatggagcaggacatagacagtagcacggaggatggaactgaacccagcccttctcagagctctgctgaacggtcctagtgtttggacacaatagtgcactttaaaacctgcttggttaccaagtgtccagggaaacccttgtattttgatgactaaaaagagc

SEQ ID NO: 35 - DNA, 1439 bp, Homo sapiens
tgcggcggcgagggaggaggaagaagcggaggaggcggctcccgcgctcgcagggccgtgccacctgcccgcccgcccgctcgctcgctcgcccgccgcgccgcgctgccgaccgccagcatgctgccgagagtgggctgccccgcgctgccgctgccgccgccgccgctgctgccgctgctgccgctgctgctgctgctactgggcgcgagtggcggcggcggcggggcgcgcgcggaggtgctgttccgctgcccgccctgcacacccgagcgcctggccgcctgcgggcccccgccggttgcgccgcccgccgcggtggccgcagtggccggaggcgcccgcatgccatgcgcggagctcgtccgggagccgggctgcggctgctgctcggtgtgcgcccggctggagggcgaggcgtgcggcgtctacaccccgcgctgcggccaggggctgcgctgctatccccacccgggctccgagctgcccctgcaggcgctggtcatgggcgagggcacttgtgagaagcgccgggacgccgagtatggcgccagcccggagcaggttgcagacaatggcgatgaccactcagaaggaggcctggtggagaaccacgtggacagcaccatgaacatgttgggcgggggaggcagtgctggccggaagcccctcaagtcgggtatgaaggagctggccgtgttccgggagaaggtcactgagcagcaccggcagatgggcaagggtggcaagcatcaccttggcctggaggagcccaagaagctgcgaccaccccctgccaggactccctgccaacaggaactggaccaggtcctggagcggatctccaccatgcgccttccggatgagcggggccctctggagcacctctactccctgcacatccccaactgtgacaagcatggcctgtacaacctcaaacagtgcaagatgtctctgaacgggcagcgtggggagtgctggtgtgtgaaccccaacaccgggaagctgatccagggagcccccaccatccggggggaccccgagtgtcatctcttctacaatgagcagcaggaggctcgcggggtgcacacccagcggatgcagtagaccgcagccagccggtgcctggcgcccctgccccccgcccctctccaaacaccggcagaaaacggagagtgcttgggtggtgggtgctggaggattttccagttctgacacacgtatttatatttggaaagagaccagcaccgagctcggcacctccccggcctctctcttcccagctgcagatgccacacctgctccttcttgctttccccgggggaggaagggggttgtggtcggggagctggggtacaggtttggggagggggaagagaaatttttatttttgaacccctgtgtcccttttgcataagattaaaggaaggaaaagtaaa

SEQ ID NO: 36 - DNA, 7472 bp, Homo sapiens
gcaccgcggcgagcttggctgcttctggggcctgtgtggccctgtgtgtcggaaagatggagcaagaagccgagcccgaggggcggccgcgacccctctgaccgagatcctgctgctttcgcagccaggagcaccgtccctccccggattagtgcgtacgagcgcccagtgccctggcccggagagtggaatgatccccgaggcccagggcgtcgtgcttccgcgcgccccgtgaaggaaactggggagtcttgagggacccccgactccaagcgcgaaaaccccggatggtgaggagcaggcaaatgtgcaataccaacatgtctgtacctactgatggtgctgtaaccacctcacagattccagcttcggaacaagagaccctggttagaccaaagccattgcttttgaagttattaaagtctgttggtgcacaaaaagacacttatactatgaaagaggttcttttttatcttggccagtatattatgactaaacgattatatgatgagaagcaacaacatattgtatattgttcaaatgatcttctaggagatttgtttggcgtgccaagcttctctgtgaaagagcacaggaaaatatataccatgatctacaggaacttggtagtagtcaatcagcaggaatcatcggactcaggtacatctgtgagtgagaacaggtgtcaccttgaaggtgggagtgatcaaaaggaccttgtacaagagcttcaggaagagaaaccttcatcttcacatttggtttctagaccatctacctcatctagaaggagagcaattagtgagacagaagaaaattcagatgaattatctggtgaacgacaaagaaaacgccacaaatctgatagtatttccctttcctttgatgaaagcctggctctgtgtgtaataagggagatatgttgtgaaagaagcagtagcagtgaatctacagggacgccatcgaatccggatcttgatgctggtgtaagtgaacattcaggtgattggttggatcaggattcagtttcagatcagtttagtgtagaatttgaagttgaatctctcgactcagaagattatagccttagtgaagaaggacaagaactctcagatgaagatgatgaggtatatcaagttactgtgtatcaggcaggggagagtgatacagattcatttgaagaagatcctgaaatttccttagctgactattggaaatgcacttcatgcaatgaaatgaatcccccccttccatcacattgcaacagatgttgggcccttcgtgagaattggcttcctgaagataaagggaaagataaaggggaaatctctgagaaagccaaactggaaaactcaacacaagctgaagagggctttgatgttcctgattgtaaaaaaactatagtgaatgattccagagagtcatgtgttgaggaaaatgatgataaaattacacaagcttcacaatcacaagaaagtgaagactattctcagccatcaacttctagtagcattatttatagcagccaagaagatgtgaaagagtttgaaagggaagaaacccaagacaaagaagagagtgtggaatctagtttgccccttaatgccattgaaccttgtgtgatttgtcaaggtcgacctaaaaatggttgcattgtccatggcaaaacaggacatcttatggcctgctttacatgtgcaaagaagctaaagaaaaggaataagccctgcccagtatgtagacaaccaattcaaatgattgtgctaacttatttcccctagttgacctgtctataagagaattatatatttctaactatataaccctaggaatttagacaacctgaaatttattcacatatatcaaagtgagaaaatgcctcaattcacatagatttcttctctttagtataattgacctactttggtagtggaatagtgaatacttactataatttgacttgaatatgtagctcatcctttacaccaactcctaattttaaataatttctactctgtcttaaatgagaagtacttggtttttttttttcttaaatatgtatatgacatttaaatgtaacttattattttttttgagaccgagtcttgctctgttacccaggctggagtgcagtggcgtgatcttggctcactgcaagctctgcctcccgggttcgcaccattctcctgcctcagcctcccaattagcttggcctacagtcatctgccaccacacctggctaattttttgtacttttagtagagacagggtttcaccgtgttagccaggatggtctcgatctcctgacctcgtgatccgcccacctcggcctcccaaagtgctgggattacaggcatgagccaccgcgtccggcctaaatgtcacttagtacctttgatataaagagaaaatgtgtgaaagatttagttttttgtttttttgtttgtttgtttgtttgtttgttttgagatgagtctctctgtcgcccaggctggagtgcagtgtcatgatctagcagtctccgcttcccgggttcaagccattctcctggctcagcctctggagcagctgggattacaggcatgcaccaccatgcccagctaatttttgtatttttagtagagatagggtttcaccatgttggccaggctggtcacgaactcctgacctcaagtgaggtcacccgcctcggcctcccgaagtgctgggattgcagatgtgagccaccatgtccagccaagaattagtatttaaattttagatactctttttttttttttttttttttttttttgagacagagtcttgctccatcacccatgctagagtgcagtggagtgatctcggctcactgcaacttccgccttctgggttcaagctattctcctgcctcagccttccaagtaactgggattacaggcatgtaccaccataccagctgatttttttgtatttttagtaaagacagggtttcaccatgttagccaggctgatcttgaactcctaaactcaagtgatctactcacctcagcctcccaaaatgctgggattacagatgtgaggcacctggcctcagatttttgatactcttaaaccttctgatccttagtttctctctccaaaatactctttctaggttaaaaaaaaaaaggctcttatatttggtgctatgtaaatgaaaatgttttttaggttttcttgatttaacaatagagacagggtctccctgtgttgcccaggctggtctcgaactcctgggctcaagagatcctcctgtcttggcctcgcaaagtgctaagtaggattacaggcgttagccaccacacccggctgtaaaaatgtacttattctccagcctcttttgtataaaccatagtaagggatgggagtaatgatgttatctgtgaaaatagccaccatttacccgtaagacaaaacttgttaaagcctcctgagtctaacctagattacatcaggccctttttcacacacaaaaaaatcctttatgggatttaatggaatctgttgtttccccctaagttgaaaaacaactctaagacactttaaagtaccttcttggcctgggttacatggttcccagcctaggtttcagacttttgcttaaggccagttttagaaacccgtgaattcagaaaagttaattcagaaatttgataaacagaattgttatttaaaaactaactggaaagattgttaagttctttctgaattattcagaaattatgcatcattttccttcaagaatgacagggtcagcatgtggaattccaagatacctcttgacttcctctcaagctccgtgtttggtcagtggaggcccatccgagctcagcactgagaagtgttagtttctttgggacccatctaccctgaccacatcatgatgttcatctgcagctgttgcaaggtgttcagattgtataaacataaatgtcacaaaaactttaaaagaagtgcaattctcaaaaggttaggtggactaaagcattctgtaaagcaactgctaataatgagcttacagtggatttgaatttgaaaaatatagtaacaagcctgtcaaatatctgcaagaactatggaataaaactactgatgcagtgaagacagttgaaaagatcaaacaaatgccaagctatatttataatgaacaaattcaagaaaaaggactacggaaagttcaggacatcaaagaagtcaggcaaaactcatcttgacccctgttgcaggcaaaggaacgcagctggaagaaaagatgatataacagttaacaggatgcagacatggcagaggtttcctaaaaatctcattatctataaccatttctatatttacatttgaaaatctcctttggagacttagaacctctaaattattgacttattttttatataaggtcactccgatgaaaggtgattacaaaatcatctacattgctgtctacaaaacagataatatggatgtttgatcgcatctcattgttaactctttactgatatgtttgtaaatacagaagtgaaatgtggacataaaatagttacgctatttggttaatggtactagacaacatgtaattaatgacattcaaaaatttatggctagtgatatatataaagtaaaattttctttgcagtaaaatatgccctttattatagaagggaggatataaggaaccaacagtttgtatgaaaatagctcaaataatatcttttattttgattttaatatttcttattttggtttattagtgtcttagaacaaaatggccttatataatgaagcctagttatgctggactgttttgatctcttttaattgttctgacagatagttggggatgagagccgaataaggtttgcctgaaataactgacactatataatttctgctttggcaaatactaagttctaacttgtcattcctggtagaacaagctttatttttcgagcctagcaatgatctagaagcagatgttatctcagtgccttttgcaatttgttgtgtgggtttttttttttttaaagccacacaataattttggaaaacaatgtatgggtagaacatgtgtctgttaattgcacacaaaaccacttttaatgggtacagagttaaatttgaaggaataagttctagctgaagtattatgaactccaaataatgctttgaggacctccaaaggtaaaagtactaatccctttggccatttattgagagagagagagagagagagtagggtgactatagttaatgtattgaatgttcttgctacaaataaatgatatttgagctgatgggtgtgctaattacactgatttgatcaatacccattgtatgtgaaacagtacatacaccatatttacaattatgtatttaacatttaaaatttctaatataagtatctctcaaactgtggattaacttcttgatttatatttaaatatgaatcttaagcaaaacagtgaaaataaccatcttgatttagtgtttttctcccatatgtgaattgtatatacttaggtgaagacaataaaatcaactgaactgtaagcttagaataggactgaggtaattctgcacagcaactttactaatggtacattgttgcttcaaaactctctctctctctctctgtctgtctcaataaatggccaaagggattagtagtttacctgtggaggtcctccaagcattatttggagttgataatacttcagctacaaccaagcagaatctcttttttttggaggtcctcgaagcattatttggagttgataatacttcagcttcaatttggagttgataatatttcagctagaacctagtagaatctgtttttttcctttggaggtcctcaaagcattattggagttcataatactgaagctagaaccaagcagaatctgtttttttctgaggagtatcggtagcataaatgtgattataaacatagtacacttgatatatggaggcagtgacagctatttttacaaaatttaaatctgcaaatggattcaacatgtttatgggttattaaaattgtctgatttcttaggttctttatagtacacgtgttgaaaataaatgattaagaattgtttcaagaatgcaattatttgatcttaaatttttatgagttgttaaaatagaaattatttgaatatcatatatttgggtaacaaaaggcacaagtctgaatgtgtttctttttctggaatggccatgcctgcccactttagaaatacaaatatcactgggcagcttgaagcagttgggagcctccaatgagagcaacttgagagaatgatgttgcaagttagtaggagtaagaaatgctgtgttctccctgtcttctcttaggtcacatggcagcctggcctaagtgatcgtgaatggtctataagggaggtagctgggacagggaggggagtttgggctagccaccgtaccacttgtcagcgtgaaaagtaagattgtaattgcctgtttagttttctgcctcatctttgaaagttccaccaagctgggaacctcttgattgtgaggcacaaatgtaagtacatcagaaaaaaacaaaaaaactggctttaaagcaggagcttgtgggcccctaagccagacggggactagcttttggcattatataattaagattttttaaatccttaataagggttttattttatttttatttattttttgagacggagtcttgctctgtggctcaggctggagtacagtggtgcaatcttggctcactgcaacctctgcctcctggctgtgttcaagtggttctgcttcagcctcccaagtagctggggttagagcaccctgtcaccacgccccgctaatttttgtatttctagcagagatgaagtttcactatgttggccaggctgggctcaaactcctgacctcaagtgatctgcccgccttggccccccaaagtgctgtgattacaggcgtgagccgccacgcccagcctaataagggttttaaagataattagtgtgtaggtctgtaggcttatgatggtaaccacaagttgttaatggcattgtgaaaagtttttagttgcgctttatgggtggatgctgaattacattttgatttgatacttataaaaagaaaaagtatttcttcagcttaaaaaattgtttaaaagtttgtgatcatattgtctaccatgtagccagctttcaattatatgtaagagggactttttgacatttacaaataatactttgaggtagatatctgaaagcaccagcacttggaaggtgttcagaagtaacaaattataaaatgagctaacaaacgaaaggcaaaataaaaccgtaaagcaagcagatgggaggcgtgttcagtaacttattcataatgcatctgaaatgattgctgtactcaaatatttaacgttagagtaatagtattttgaatgaaaaccatagttgatt

SEQ ID NO: 37 - DNA, 5572 bp, Homo sapiens
cctcccctcgcccggcgcggtcccgtccgcctctcgctcgcctcccgcctcccctcggtcttccgaggcgcccgggctcccggcgcggcggcggagggggcgggcaggccggcgggcggtgatgtggcgggactctttatgcgctgcggcaggatacgcgctcggcgctgggacgcgactgcgctcagttctctcctctcggaagctgcagccatgatggaagtttgagagttgagccgctgtgaggcgaggccgggctcaggcgagggagatgagagacggcggcggccgcggcccggagcccctctcagcgcctgtgagcagccgcgggggcagcgccctcggggagccggccggcctgcggcggcggcagcggcggcgtttctcgcctcctcttcgtcttttctaaccgtgcagcctcttcctcggcttctcctgaaagggaaggtggaagccgtgggctcgggcgggagccggctgaggcgcggcggcggcggcggcacctcccgctcctggagcgggggggagaagcggcggcggcggcggccgcggcggctgcagctccagggagggggtctgagtcgcctgtcaccatttccagggctgggaacgccggagagttggtctctccccttctactgcctccaacacggcggcggcggcggcggcacatccagggacccgggccggttttaaacctcccgtccgccgccgccgcaccccccgtggcccgggctccggaggccgccggcggaggcagccgttcggaggattattcgtcttctccccattccgctgccgccgctgccaggcctctggctgctgaggagaagcaggcccagtcgctgcaaccatccagcagccgccgcagcagccattacccggctgcggtccagagccaagcggcggcagagcgaggggcatcagctaccgccaagtccagagccatttccatcctgcagaagaagccccgccaccagcagcttctgccatctctctcctcctttttcttcagccacaggctcccagacatgacagccatcatcaaagagatcgttagcagaaacaaaaggagatatcaagaggatggattcgacttagacttgacctatatttatccaaacattattgctatgggatttcctgcagaaagacttgaaggcgtatacaggaacaatattgatgatgtagtaaggtttttggattcaaagcataaaaaccattacaagatatacaatctttgtgctgaaagacattatgacaccgccaaatttaattgcagagttgcacaatatccttttgaagaccataacccaccacagctagaacttatcaaacccttttgtgaagatcttgaccaatggctaagtgaagatgacaatcatgttgcagcaattcactgtaaagctggaaagggacgaactggtgtaatgatatgtgcatatttattacatcggggcaaatttttaaaggcacaagaggccctagatttctatggggaagtaaggaccagagacaaaaagggagtaactattcccagtcagaggcgctatgtgtattattatagctacctgttaaagaatcatctggattatagaccagtggcactgttgtttcacaagatgatgtttgaaactattccaatgttcagtggcggaacttgcaatcctcagtttgtggtctgccagctaaaggtgaagatatattcctccaattcaggacccacacgacgggaagacaagttcatgtactttgagttccctcagccgttacctgtgtgtggtgatatcaaagtagagttcttccacaaacagaacaagatgctaaaaaaggacaaaatgtttcacttttgggtaaatacattcttcataccaggaccagaggaaacctcagaaaaagtagaaaatggaagtctatgtgatcaagaaatcgatagcatttgcagtatagagcgtgcagataatgacaaggaatatctagtacttactttaacaaaaaatgatcttgacaaagcaaataaagacaaagccaaccgatacttttctccaaattttaaggtgaagctgtacttcacaaaaacagtagaggagccgtcaaatccagaggctagcagttcaacttctgtaacaccagatgttagtgacaatgaacctgatcattatagatattctgacaccactgactctgatccagagaatgaaccttttgatgaagatcagcatacacaaattacaaaagtctgaatttttttttatcaagagggataaaacaccatgaaaataaacttgaataaactgaaaatggacctttttttttttaatggcaataggacattgtgtcagattaccagttataggaacaattctcttttcctgaccaatcttgttttaccctatacatccacagggttttgacacttgttgtccagttgaaaaaaggttgtgtagctgtgtcatgtatatacctttttgtgtcaaaaggacatttaaaattcaattaggattaataaagatggcactttcccgttttattccagttttataaaaagtggagacagactgatgtgtatacgtaggaattttttccttttgtgttctgtcaccaactgaagtggctaaagagctttgtgatatactggttcacatcctacccctttgcacttgtggcaacagataagtttgcagttggctaagagaggtttccgaagggttttgctacattctaatgcatgtattcgggttaggggaatggagggaatgctcagaaaggaaataattttatgctggactctggaccatataccatctccagctatttacacacacctttctttagcatgctacagttattaatctggacattcgaggaattggccgctgtcactgcttgttgtttgcgcatttttttttaaagcatattggtgctagaaaaggcagctaaaggaagtgaatctgtattggggtacaggaatgaaccttctgcaacatcttaagatccacaaatgaagggatataaaaataatgtcataggtaagaaacacagcaacaatgacttaaccatataaatgtggaggctatcaacaaagaatgggcttgaaacattataaaaattgacaatgatttattaaatatgttttctcaattgtaacgacttctccatctcctgtgtaatcaaggccagtgctaaaattcagatgctgttagtacctacatcagtcaacaacttacacttattttactagttttcaatcataatacctgctgtggatgcttcatgtgctgcctgcaagcttcttttttctcattaaatataaaatattttgtaatgctgcacagaaattttcaatttgagattctacagtaagcgttttttttctttgaagatttatgatgcacttattcaatagctgtcagccgttccacccttttgaccttacacattctattacaatgaattttgcagttttgcacattttttaaatgtcattaactgttagggaattttacttgaatactgaatacatataatgtttatattaaaaaggacatttgtgttaaaaaggaaattagagttgcagtaaactttcaatgctgcacacaaaaaaaagacatttgatttttcagtagaaattgtcctacatgtgctttattgatttgctattgaaagaatagggtttttttttttttttttttttttttttttaaatgtgcagtgttgaatcatttcttcatagtgctcccccgagttgggactagggcttcaatttcacttcttaaaaaaaatcatcatatatttgatatgcccagactgcatacgattttaagcggagtacaactactattgtaaagctaatgtgaagatattattaaaaaggtttttttttccagaaatttggtgtcttcaaattataccttcaccttgacatttgaatatccagccattttgtttcttaatggtataaaattccattttcaataacttattggtgctgaaattgttcactagctgtggtctgacctagttaatttacaaatacagattgaataggacctactagagcagcatttatagagtttgatggcaaatagattaggcagaacttcatctaaaatattcttagtaaataatgttgacacgttttccataccttgtcagtttcattcaacaatttttaaatttttaacaaagctcttaggatttacacatttatatttaaacattgatatatagagtattgattgattgctcataagttaaattggtaaagttagagacaactattctaacacctcaccattgaaatttatatgccaccttgtctttcataaaagctgaaaattgttacctaaaatgaaaatcaacttcatgttttgaagatagttataaatattgttctttgttacaatttcgggcaccgcatattaaaacgtaactttattgttccaatatgtaacatggagggccaggtcataaataatgacattataatgggcttttgcactgttattatttttcctttggaatgtgaaggtctgaatgagggttttgattttgaatgtttcaatgtttttgagaagccttgcttacattttatggtgtagtcattggaaatggaaaaatggcattatatatattatatatataaatatatattatacatactctccttactttatttcagttaccatccccatagaatttgacaagaattgctatgactgaaaggttttcgagtcctaattaaaactttatttatggcagtattcataattagcctgaaatgcattctgtaggtaatctctgagtttctggaatattttcttagactttttggatgtgcagcagcttacatgtctgaagttacttgaaggcatcacttttaagaaagcttacagttgggccctgtaccatcccaagtcctttgtagctcctcttgaacatgtttgccatacttttaaaagggtagttgaataaatagcatcaccattctttgctgtggcacaggttataaacttaagtggagtttaccggcagcatcaaatgtttcagctttaaaaaataaaagtagggtacaagtttaatgtttagttctagaaattttgtgcaatatgttcataacgatggctgtggttgccacaaagtgcctcgtttacctttaaatactgttaatgtgtcatgcatgcagatggaaggggtggaactgtgcactaaagtgggggctttaactgtagtatttggcagagttgccttctacctgccagttcaaaagttcaacctgttttcatatagaatatatatactaaaaaatttcagtctgttaaacagccttactctgattcagcctcttcagatactcttgtgctgtgcagcagtggctctgtgtgtaaatgctatgcactgaggatacacaaaaataccaatatgatgtgtacaggataatgcctcatcccaatcagatgtccatttgttattgtgtttgttaacaaccctttatctcttagtgttataaactccacttaaaactgattaaagtctcattcttgtcaaaaaaaaaaaaaaaaaaaaaaaaaaa

SEQ ID NO: 38 - DNA, 2591 bp, Homo sapiens
gatgggattggggttttcccctcccatgtgctcaagactggcgctaaaagttttgagcttctcaaaagtctagagccaccgtccagggagcaggtagctgctgggctccggggacactttgcgttcgggctgggagcgtgctttccacgacggtgacacgcttccctggattggcagccagactgccttccgggtcactgccatggaggagccgcagtcagatcctagcgtcgagccccctctgagtcaggaaacattttcagacctatggaaactacttcctgaaaacaacgttctgtcccccttgccgtcccaagcaatggatgatttgatgctgtccccggacgatattgaacaatggttcactgaagacccaggtccagatgaagctcccagaatgccagaggctgctccccccgtggcccctgcaccagcagctcctacaccggcggcccctgcaccagccccctcctggcccctgtcatcttctgtcccttcccagaaaacctaccagggcagctacggtttccgtctgggcttcttgcattctgggacagccaagtctgtgacttgcacgtactcccctgccctcaacaagatgttttgccaactggccaagacctgccctgtgcagctgtgggttgattccacacccccgcccggcacccgcgtccgcgccatggccatctacaagcagtcacagcacatgacggaggttgtgaggcgctgcccccaccatgagcgctgctcagatagcgatggtctggcccctcctcagcatcttatccgagtggaaggaaatttgcgtgtggagtatttggatgacagaaacacttttcgacatagtgtggtggtgccctatgagccgcctgaggttggctctgactgtaccaccatccactacaactacatgtgtaacagttcctgcatgggcggcatgaaccggaggcccatcctcaccatcatcacactggaagactccagtggtaatctactgggacggaacagctttgaggtgcgtgtttgtgcctgtcctgggagagaccggcgcacagaggaagagaatctccgcaagaaaggggagcctcaccacgagctgcccccagggagcactaagcgagcactgcccaacaacaccagctcctctccccagccaaagaagaaaccactggatggagaatatttcacccttcagatccgtgggcgtgagcgcttcgagatgttccgagagctgaatgaggccttggaactcaaggatgcccaggctgggaaggagccaggggggagcagggctcactccagccacctgaagtccaaaaagggtcagtctacctcccgccataaaaaactcatgttcaagacagaagggcctgactcagactgacattctccacttcttgttccccactgacagcctcccacccccatctctccctcccctgccattttgggttttgggtctttgaacccttgcttgcaataggtgtgcgtcagaagcacccaggacttccatttgctttgtcccggggctccactgaacaagttggcctgcactggtgttttgttgtggggaggaggatggggagtaggacataccagcttagattttaaggtttttactgtgagggatgtttgggagatgtaagaaatgttcttgcagttaagggttagtttacaatcagccacattctaggtaggggcccacttcaccgtactaaccagggaagctgtccctcactgttgaattttctctaacttcaaggcccatatctgtgaaatgctggcatttgcacctacctcacagagtgcattgtgagggttaatgaaataatgtacatctggccttgaaaccaccttttattacatggggtctagaacttgacccccttgagggtgcttgttccctctccctgttggtcggtgggttggtagtttctacagttgggcagctggttaggtagagggagttgtcaagtctctgctggcccagccaaaccctgtctgacaacctcttggtgaaccttagtacctaaaaggaaatctcaccccatcccacaccctggaggatttcatctcttgtatatgatgatctggatccaccaagacttgttttatgctcagggtcaatttcttttttcttttttttttttttttttctttttctttgagactgggtctcgctttgttgcccaggctggagtggagtggcgtgatcttggcttactgcagcctttgcctccccggctcgagcagtcctgcctcagcctccggagtagctgggaccacaggttcatgccaccatggccagccaacttttgcatgttttgtagagatggggtctcacagtgttgcccaggctggtctcaaactcctgggctcaggcgatccacctgtctcagcctcccagagtgctgggattacaattgtgagccaccacgtccagctggaagggtcaacatcttttacattctgcaagcacatctgcattttcaccccacccttcccctccttctccctttttatatcccatttttatatcgatctcttattttacaataaaactttgctgccacctgtgtgtctgaggggtg

SEQ ID NO: 39 - DNA, 3053 bp, Homo sapiens
gagcgcggctggagtttgctgctgccgctgtgcagtttgttcaggggcttgtggtggtgagtccgagaggctgcgtgtgagagacgtgagaaggatcctgcactgaggaggtggaaagaagaggattgctcgaggaggcctggggtctgtgaggcagcggagctgggtgaaggctgcgggttccggcgaggcctgagctgtgctgtcgtcatgcctcaaacccgatcccaggcacaggctacaatcagttttccaaaaaggaagctgtctcgggcattgaacaaagctaaaaactccagtgatgccaaactagaaccaacaaatgtccaaaccgtaacctgttctcctcgtgtaaaagccctgcctctcagccccaggaaacgtctgggcgatgacaacctatgcaacactccccatttacctccttgttctccaccaaagcaaggcaagaaagagaatggtccccctcactcacatacacttaagggacgaagattggtatttgacaatcagctgacaattaagtctcctagcaaaagagaactagccaaagttcaccaaaacaaaatactttcttcagttagaaaaagtcaagagatcacaacaaattctgagcagagatgtccactgaagaaagaatctgcatgtgtgagactattcaagcaagaaggcacttgctaccagcaagcaaagctggtcctgaacacagctgtcccagatcggctgcctgccagggaaagggagatggatgtcatcaggaatttcttgagggaacacatctgtgggaaaaaagctggaagcctttacctttctggtgctcctggaactggaaaaactgcctgcttaagccggattctgcaagacctcaagaaggaactgaaaggctttaaaactatcatgctgaattgcatgtccttgaggactgcccaggctgtattcccagctattgctcaggagatttgtcaggaagaggtatccaggccagctgggaaggacatgatgaggaaattggaaaaacatatgactgcagagaagggccccatgattgtgttggtattggacgagatggatcaactggacagcaaaggccaggatgtattgtacacgctatttgaatggccatggctaagcaattctcacttggtgctgattggtattgctaataccctggatctcacagatagaattctacctaggcttcaagctagagaaaaatgtaagccacagctgttgaacttcccaccttataccagaaatcagatagtcactattttgcaagatcgacttaatcaggtatctagagatcaggttctggacaatgctgcagttcaattctgtgcccgcaaagtctctgctgtttcaggagatgttcgcaaagcactggatgtttgcaggagagctattgaaattgtagagtcagatgtcaaaagccagactattctcaaaccactgtctgaatgtaaatcaccttctgagcctctgattcccaagagggttggtcttattcacatatcccaagtcatctcagaagttgatggtaacaggatgaccttgagccaagaaggagcacaagattccttccctcttcagcagaagatcttggtttgctctttgatgctcttgatcaggcagttgaaaatcaaagaggtcactctggggaagttatatgaagcctacagtaaagtctgtcgcaaacagcaggtggcggctgtggaccagtcagagtgtttgtcactttcagggctcttggaagccaggggcattttaggattaaagagaaacaaggaaacccgtttgacaaaggtgtttttcaagattgaagagaaagaaatagaacatgctctgaaagataaagctttaattggaaatatcttagctactggattgccttaaattcttctcttacaccccacccgaaagtattcagctggcatttagagagctacagtcttcattttagtgctttacacattcgggcctgaaaacaaatatgaccttttttacttgaagccaatgaattttaatctatagattctttaatattagcacagaataatatctttgggtcttactatttttacccataaaagtgaccaggtagaccctttttaattacattcactacttctaccacttgtgtatctctagccaatgtgcttgcaagtgtacagatctgtgtagaggaatgtgtgtatatttacctcttcgtttgctcaaacatgagtgggtatttttttgtttgttttttttgttgttgttgtttttgaggcgcgtctcaccctgttgcccaggctggagtgcaatggcgcgttctctgctcactacagcacccgcttcccaggttgaagtgattctcttgcctcagcctcccgagtagctgggattacaggtgcccaccaccgcgcccagctaattttttaatttttagtagagacagggttttaccatgttggccaggctggtcttgaactcctgaccctcaagtgatctgcccaccttggcctccctaagtgctgggattataggcgtgagccaccatgctcagccattaaggtattttgttaagaactttaagtttagggtaagaagaatgaaaatgatccagaaaaatgcaagcaagtccacatggagatttggaggacactggttaaagaatttatttctttgtatagtatactatgttcatggtgcagatactacaacattgtggcattttagactcgttgagtttcttgggcactcccaagggcgttggggtcataaggagactataactctacagattgtgaatatatttattttcaagttgcattctttgtctttttaagcaatcagatttcaagagagctcaagctttcagaagtcaatgtgaaaattccttcctaggctgtcccacagtctttgctgcccttagatgaagccacttgtttcaagatgactactttggggttgggttttcatctaaacacatttttccagtcttattagataaattagtccatatggttggttaatcaagagccttctgggtttggtttggtggcattaaatgg

SEQ ID NO: 40 - DNA, 8774 bp, Homo sapiens
gaagagtcgccggtggccgcggcagacggaagccgaacgagttcctcggcggctgcaggatgggggactccaaagtgaaagtggcggtgcggatacgacccatgaaccggcgagagactgacttgcataccaaatgtgtggtggatgtggatgcaaacaaggttattcttaatcctgtaaatacgaatctttccaaaggagatgcccggggccagccgaaggtgtttgcttatgatcattgtttctggtctatggatgaatctgtcaaagaaaagtatgcaggtcaagatattgttttcaagtgccttggagagaatatcctgcagaatgcttttgatggctacaatgcatgtatctttgcctatggacagactggctctggaaaatcttataccatgatgggcacagctgaccaacctggattaatcccaagactttgcagtggactctttgaacgaactcagaaagaggaaaatgaagaacagagttttaaagtagaagtgtcctacatggaaatttataatgaaaaagttcgagaccttcttgatcccaaaggaagccgtcagacgttgaaagtcagagagcatagtgtgttgggaccttatgtcgacggactttctaaactggctgtcacaagctacaaggatattgagtcgttgatgtctgagggtaacaaatctcgcacagttgctgcaaccaacatgaacgaggagagtagccgatcccatgcagttttcaaaatcaccctcacacatactctctacgatgtgaagtctgggacatctggagagaaagtgggcaaactcagcctggtggatttagctggcagtgaacgagcaacgaagacaggcgctgcaggggacaggctgaaggaagggagcaacattaacaagtccctcacaaccctcggtctggttatctcagctcttgcagatcagagtgctggcaaaaacaagaataaatttgttccatatcgtgactcagttctcacttggctgctcaaagacagcctcgggggtaacagcaagaccgccatggtggctactgtgagtcctgcagctgataactatgatgaaaccctctcaactctgcggtatgcagatcgagccaagcacattgtaaaccacgctgtggtgaatgaggaccctaatgcccgaattatccgggatctccgggaagaagttgagaaactccgggagcagctgaccaaagcagaggcaatgaaatctccagagctaaaggaccggctggaagaatctgagaagctaatccaggaaatgactgtgacctgggaggagaaattaaggaaaacggaggagattgcacaggaacgacagaaacagcttgagagtcttggaatatctcttcagtcttcgggaatcaaagttggggatgataaatgcttccttgtgaatctgaatgctgacccagctctgaatgagcttctggtgtactatttaaaggaacatacattgatagggtcagcaaattcccaagatatccaactgtgcggcatgggaattcttcctgaacactgtattatagacatcacgtcagaaggccaggttatgctgactcctcagaagaacaccagaacatttgtaaatgggtcatctgtctccagtccaatacagctacaccatggggacaggatattatggggaaacaatcatttcttcagactcaatttgcctaaaaagaaaaagaaagcagaacgagaggatgaggaccaggatccctccatgaagaacgagaatagttctgagcagctggatgtagacggagactcctccagcgaggtgtccagtgaagttaactttaattacgaatacgcacagatggaggtcaccatgaaggccctgggcagcaatgatccgatgcagtccatattaaacagcttagaacaacagcatgaagaagaaaaacgatctgcactggagcgccagaggcttatgtatgagcacgaattggagcagctccggagaaggctgtctcctgagaagcagaactgccggagcatggacaggttttctttccactcgcccagcgctcagcaacgcttaagacagtgggctgaggagagagaagcaacgttgaataacagcctgatgaggctgagggaacaaattgttaaggccaatctattggtgagagaagctaattacattgctgaggagctggataaaagaacagaatacaaagttaccctacagattccagcctccagcctggatgccaacaggaagcgaggctctcttcttagtgagcctgcaatccaggtgagaagaaaaggaaaaggaaagcagatttggtctttggaaaaactggacaacaggctgttggatatgagagacctttatcaggagtggaaagagtgtgaagaagataacccagtaatacgatcatacttcaaacgtgctgatccattctatgatgagcaggaaaatcacagtctcattggggtggccaatgtcttcctcgagtcacttttctatgatgtgaagttacaatacgctgttcccatcatcaaccagaaaggagaggtggcaggtcggctgcacgtggaggtgatgcgactcagtggtgatgttggggagaggatcgcaggaggcgatgaggtggcagaggtctcctttgagaaggagacccaggagaacaaactggtgtgcatggttaaaatcctgcaagctactgggttgccacagcatctgtcccactttgtgttctgcaaatacagcttctgggatcaacaggagccggtgattgtcgctcctgaagtggacacctcctcctcttccgtcagcaaggagccgcactgcatggttgtctttgatcattgcaatgagttttctgttaacatcaccgaagactttatcgagcatctttccgaaggagcattggcaattgaagtatatggacataaaataaacgatccccggaaaaaccccgccctgtgggatttgggaatcatccaagcaaagacacgtagtcttcgggacagatggagtgaagtgaccaggaaattggaattctgggttcaaatcttggaacagaatgagaatggtgaatactgccctgtagaagtgatttctgcaaaggatgtcccaacaggaggaatcttccagctccggcaggggcagtcccggagagttcaagtcgaagtgaagtcagtgcaggaatctgggactttaccactgatggaagaatgtatactgtctgttggcattggatgtgtcaaagttagaccgctcagagcccccagaacacatgagaccttccatgaggaagaggaagacatggacagctaccaggatcgagatttagagagacttcgtagaaaatggctaaatgcattaacaaaacgtcaggagtacttggatcaacaattgcaaaagcttgtcagtaaacgtgataaaacagaggatgatgctgaccgtgaagcgcagcttctggagatgcggttgaccctaactgaggagaggaacgcggtgatggtcccctctgctggcagtggtattccaggggccccagcagaatggaccccagtacctgggatggagacacacattcctgttatattcctggacttaaatgctgatgatttcagctctcaggataatcttgatgacccagaagctggtggatgggatgcgaccttgactggggaagaagaagaggagttctttgaattgcagattgtgaagcagcatgatggggaggtgaaagcagaagcctcctgggactccgcggtgcatggctgccctcagctcagcaggggcacgcccgtggacgagcggttgttcctgatcgtgcgcgtgacggtccagctcagccaccctgctgacatgcaactggtgttacgcaagagaatctgtgtcaatgttcacggccgccagggttttgcacagagtctcctaaaaaagatgtctcatcgaagttctattcctggctgtggagtgacttttgaaattgtctccaatattccagaggatgcccagggagtggaagaacgggaagcattagcaagaatggcagccaatgttgaaaacccagcttctgctgactcggaggcttatattgaaaagtacctcaggagcgtgctggctgtagaaaacctcctgactttagatcgtctgcgccaggaagttgcagtgaaggaacagttaacaggaaaaggaaagttgagcaggaggagtatcagttctccaaatgtgaacagattgtctggaagccgacaagatctcattccatcatacagtctaggcagcaacaagggccggtgggaaagtcagcaggatgtatcccaaaccacagtttccagaggaatagctcctgcccccgccctctctgtttctccccaaaataaccattctccagatccaggactcagtaaccttgcagcatcctacttgaatcctgtcaaatccttcgtgccgcaaatgccaaagctcctcaagtctctctttcccgtccgcgatgagaagaggggcaagcggccgtctcccctcgcacaccagcccgtgccccgcatcatggtgcagtcagccagcccggacatcagggtgaccaggatggaggaggctcagccggagatgggccctgacgtgctggtgcagacgatgggggccccggccttgaagatctgcgacaaacctgccaaagtgccttccccaccgcctgtcatagctgtcacagcggtcaccccggctccggaggcacaggacgggccccccagccccctgagtgaagcctctagcgggtacttctcccacagcgtctccaccgcgaccctgtcggacgccctgggccccggcctggacgctgcggccccgccggggtccatgcccaccgcccctgaggccgagcccgaggcgcccatcagccaccccccaccgcccacggccgtccccgccgaggagccccctggcccccagcagctcgtgagccccggtcgggagcgccccgacctcgaggccccggcgcccggctccccgttccgcgtccggagggtgcgggcctcggagttgcgctccttctcgcgcatgctggctggggaccccggctgctccccgggggccgaggggaatgcgccggccccgggcgccgggggacaggccctggcctctgattccgaggaagctgacgaggtcccggagtggctccgagagggcgagttcgtcaccgtgggcgcccacaaaacgggcgtggtgagatacgtggggcctgccgacttccaagagggcacgtgggtcggcgtggagctcgacctgccctcaggtaagaatgacggttccatcggcgggaagcagtacttcaggtgtaaccctggctacgggctgctggtcaggcccagccgggtccgcagggccacgggccctgtgcggcggcgcagcacaggactccggctgggtgcccccgaggcccgccggagcgccaccctctcgggctccgccaccaacctggcctcgctgacagctgccctggccaaggccgacaggagccacaagaaccctgagaaccggaaatcctgggccagctgagccgctgccttagggcgaacttttctgggggtgcccggccccttttgagccctgccagtgacagccctgaggagccaggagcccggtggccccttccccaggggcagggcgatgaatgctttttgcacgacacagggctggtgacctccctgggcctctggaagctttgtttcttctgtacccgggtaaagtgggggcctcaactgtgcctcctcaggtggatggaaggttctgggtgcccgcaggggctgggggatgctaggactgagaccctgggtggtgcagcgcctggtgatcttgctgtgtgcctgtgcctggggccttatgttgctctttctatcatttccattctggtggccccactaatgtcttaacctaaaccataattgtaaccagtgcctttcctccccactggagggcaagcccccccacccacccaggatgtcctggctcactccgcaagccccccagcctcccaccctggtcccagtttcccgcaaagtgcctctgggggaccccccagcctcccaccctggtcccaggttccacaagtgcctctggagggccctgggctctggcagatggtcctggtgccccagacgggggccgagggcctgagcccccccatccctcctctgccagggtttcttagcggtttctctgtggatgttttggcatctttagacacctggaaagtctcttatgtttgccgtttattcccttcacagaaggcttggaatgtatttatttatatttattttttcaaaatccgaaatcatttgcgagccgcaatcgtcgtctgcctgtgtgggggggcccagggcctgccttgcacgttgcagcctctctggccattgcagagctgctggcctcctgcccaggtggagggtcctggggacggcagaggataaagccccctcctcacatccctctattgcggatccacagtggccttactcttaacttggatgagagcaaaaacctgggagaatgatgtgcttctgtagtcggtgacaaaggaagaggcattgctactttatttggtgcacttttggtttctaggaaggtctttgggtcattttaacttctcggcaactcccagactctcagagtgtggggctggggcctggcggctgggctggtgcagggagtgtgctggttagtctccagaccctcacagcagccacgcccccaggcccaccgtgcatggtgtgggcgggacagccggaagcttccggggtggcctccacctcctggctggggcacttatgctcccagagcctttggtgccaggtttgtgggatgggggttagcgtctatgtgtggaaggccaccaatctagggacaggagtcctgggtcaagattcacacagccacccttggagctggtttctagttctcacatttagtcaacatctagaaagcgctgcggaaggctctggttctctagggacttgaaggcgccaacagagtagtctccatggtgggcctgtcccagccctggctgcgaggacaggttgtctttctctccccagttggcgagggacacgaaggctgcggccgggctggcagagggcccggcccctggggggaggcactcctccagggctctccctgtccttagccgattttgagggaaccctgtggcacctgtccctggatgaagagctgtcacctctgccttgccctttaactcaacccgcttcccagcacagcggctttctttttaaaacctgtttcactgagaagtttgtttttgggtccgctggtgtcactatggcctgggtgagaggccagcactgctgctgccctgaggggaaacgcctgggccgtgtagtggggacgctctgggaatggtggcggacgggcagcgtgggtgggacctggcacttcgtggtggctgagccatccacccagcagcggcctcctgtagcaccatcttgggaaagtcctgggggacgtgtgtgtcgtgctttttaccatcggtttgacttacagtggagtagaacgagccagagttcctgacttgagcaggtggatttgggcccaggccctgttcactcttgcttctcggtgcggactaatgtcagcttgtggctgggaaagagggatgtgcagtgacgtggtcaccaaggcagtgagccccgctgaccccgggccagcacttggcaggcaggaggtgcggtctccagagtggtgggccagggcgggctggcctccgtcttctatcttcttttcttgcctccctgaccagcagactcacctcccaagaacgcctgcccgcccacccgccttaggactcccgatgcgctcctggaaggccccaggagtggcaccttagtgtgggtcggcccgcagatggcacccaaggccgggaagggcagtaactgcacacgcggcgctgtcagagatgggggtgggggatgcttctgggggccctgcctccccattgtgtgcccagaacatccctggccccaccccgccacttccctcgggcccttatgaaggactgaggctccagggtgagaaggctcacttctgccccgggcactgcgtccagcagcagaggggacagggggcaggtgtgtgactgggttcctgggtacccaggcctgaccagagggagcgggagggcagaggtgaggagggggaagatgtttctgggcctaccaaggttcaacaagagaacggagctgggaatgtgactgctggagcctgagaggtggaggagttctgatcccccgttacttcctagcattttctcctcttgccttaaaagttccctgtatgtgaaacgggaagtcctgagagtgtgtgttggtggctgtgcgcacgcacacaagacgggagtcaccctgtgcttcctgcccaagatactgacccattgaacccccaaagcatctttctctccacaaagtccgtggtgccttcctggtgggctgcagacactaatggtgttggggggtcttggaacagcttctctatgtgtggattcgtgtaaatgcgaagagttcacatataaagaagtgactttgattctgtgattatattgatttggtacacagtaaatgggagtttaaaaaatccaaagactctaatgacttgtaaagactctaatgatttgtatcatgtaatgaactaaaccacctgtaattttgtaccgtatgtgtctttccatcaaatgaccaacagcttctcaataaaaccagaccatttctcacctgcaaaaaaaaa

SEQ ID NO: 41 - DNA, 1220 bp, Homo sapiens
cgctccacctctcaagcagccagcgcctgcctgaatctgttctgccccctccccacccatttcaccaccaccatgacaccgggcacccagtctcctttcttcctgctgctgctcctcacagtgcttacagttgttacgggttctggtcatgcaagctctaccccaggtggagaaaaggagacttcggctacccagagaagttcagtgcccagctctactgagaagaatgctttgtctactggggtctctttctttttcctgtcttttcacatttcaaacctccagtttaattcctctctggaagatcccagcaccgactactaccaagagctgcagagagacatttctgaaatgtttttgcagatttataaacaagggggttttctgggcctctccaatattaagttcaggccaggatctgtggtggtacaattgactctggccttccgagaaggtaccatcaatgtccacgacgtggagacacagttcaatcagtataaaacggaagcagcctctcgatataacctgacgatctcagacgtcagcgtgagtgatgtgccatttcctttctctgcccagtctggggctggggtgccaggctggggcatcgcgctgctggtgctggtctgtgttctggttgcgctggccattgtctatctcattgccttggctgtctgtcagtgccgccgaaagaactacgggcagctggacatctttccagcccgggatacctaccatcctatgagcgagtaccccacctaccacacccatgggcgctatgtgccccctagcagtaccgatcgtagcccctatgagaaggtttctgcaggtaatggtggcagcagcctctcttacacaaacccagcagtggcagccacttctgccaacttgtaggggcacgtcgcccgctgagctgagtggccagccagtgccattccactccactcaggttcttcagggccagagcccctgcaccctgtttgggctggtgagctgggagttcaggtgggctgctcacagcctccttcagaggccccaccaatttctcggacacttctcagtgtgtggaagctcatgtgggcccctgagggctcatgcctgggaagtgttgtggtgggggctcccaggaggactggcccagagagccctgagatagcggggatcctgaactggactgaataaaacgtggtctcccactgcgccaaaaaaaaaaaaaaaaa

SEQ ID NO: 42 - DNA, 1616 bp, Homo sapiens
gcgcacgtcccggattcctcccacgagggggcgggctgcggccaaatctcccgccaggtcagcggccgggcgctgattggccccatggcggcggggccggctcgtgattggccagcacgccgtggtttaaagcggtcggcgcgggaaccaggggcttactgcgggacggccttggagagtactcgggttcgtgaacttcccggaggcgcaatgagctgcattaacctgcccactgtgctgcctggctcccccagcaagacccgggggcagatccaggtgattctcgggccgatgttctcaggaaaaagcacagagttgatgagacgcgtccgtcgcttccagattgctcagtacaagtgcctggtgatcaagtatgccaaagacactcgctacagcagcagcttctgcacacatgaccggaacaccatggaggcactgcccgcctgcctgctccgagacgtggcccaggaggccctgggcgtggctgtcataggcatcgacgaggggcagtttttccctgacatcgtggagttctgcgaggccatggccaacgccgggaagaccgtaattgtggctgcactggatgggaccttccagaggaagccatttggggccatcctgaacctggtgccgctggccgagagcgtggtgaagctgacggcggtgtgcatggagtgcttccgggaagccgcctataccaagaggctcggcacagagaaggaggtcgaggtgattgggggagcagacaagtaccactccgtgtgtcggctctgctacttcaagaaggcctcaggccagcctgccgggccggacaacaaagagaactgcccagtgccaggaaagccaggggaagccgtggctgccaggaagctctttgccccacagcagattctgcaatgcagccctgccaactgagggacctgcgagggccgcccgctcccttcctgccactgccgcctactggacgctgccctgcatgctgcccagccactccaggaggaagtcgggaggcgtggagggtgaccacaccttggccttctgggaactctcctttgtgtggctgccccacctgccgcatgctccctcctctcctacccactggtctgcttaaagcttccctctcagctgctgggacgatcgcccaggctggagctggccccgcttggtggcctgggatctggcacactccctctccttggggtgagggacagagccccacgctgttgacatcagcctgcttcttcccctctgcggctttcactgctgagtttctgttctccctgggaagcctgtgccagcacctttgagccttggcccacactgaggcttaggcctctctgcctgggatgggctcccaccctcccctgaggatggcctggattcacgccctcttgtttccttttgggctcaaagcccttcctacctctggtgatggtttccacaggaacaacagcatctttcaccaagatgggtggcaccaaccttgctgggacttggatcccaggggcttatctcttcaagtgtggagagggcagggtccacgcctctgctgtagcttatgaaattaactaattgaaaattcactggttggtggaaaaaaaaaaaaaaaaaaaaaa

SEQ ID NO: 43 - DNA, 1311 bp, Homo sapiens
aagttgcagcgctccgggtgcctgcgggggcgcgtccccgacgtcctgcatatatatactcaggtgcgccgcacctgctcgcccgcacctgccgccgcaccgccagctccctgtgccgcgcaccgcagcctggggcccaagggcccgcatactttctgggggccacgccctaacggcccctccacttctttgggtagtctcggagcacgccggtaggaaccgcccggccttcggggaccgcttttgtctggaaccagtccttcgggcgaagccggttccctctgctgtgagagtgtcgcttcaccggaggggacgatttgtgtttacctcggttaacaagatttgtagttacccggtccaaaaaaaaatctttttctcctttgggtgacttaaatctctatccaaattttcttgtgttgctgctccccggatttttgtttttttgtttttttgctttactgtagggtcgccctcccggcgcgtcccgtcttttctgagacaaggaaatggccaactcgggcctgcaactgctgggcttttcaatggccatgcttggctgggtgggcctgatagcgagcactgccatccctcagtggcagatgagctcctatgcgggcgacaacatcatcacagcccaggccatgtacaaggggctctggatggagtgcgtcacgcagagcaccggcatgatgagctgcaaaatgtacgactcggtgctcgccctgccgggagccctgcaggccactcgagccttaatggtggtgtccctggtgttgggcttcttagccatgtttgtcgccacgatgggcatgaagtgcacacgctgtgggggagatgacaaagcgaagaaggcccgaatagctatgactggaggcattgttttcattgtggcaggtcttgctgccttggtagcatgttcctggattggtcatcagattgtcacagacttttataaccccttgacgcccatgaacgttaagtacgagtttggacctgccatctttatcggctgggcagggtctgctctggtccttctgggaggtgccctgctctcttgctcctgtccaggcagtgaaagcaaagctgcgtaccgagcaccccgctcttaccccaagtccaattcctccaaggaatacgtgtgagctggggagcccagcctgcgggcagggtgggaggcaaaggcctcctggccactccacctccaaacatcatgtatagtttgcttggggggagggcagttggggggttactgggagaggaagacatggggtgtgcttttgtacagaaataaaattaagttttggaaattag

SEQ ID NO: 44 - DNA, 3040 bp, Homo sapiens
ctcgctcccggccgaggagcgctcgggctgtctgcggaccctgccgcgtgcaggggtcgcggccggctggagctgggagtgaggcggcggaggagccaggtgaggaggagccaggaaggcagttggtgggaagtccagcttgggtccctgagagctgtgagaaggagatgcggctgctgctggccctgttgggggtcctgctgagtgtgcctgggcctccagtcttgtccctggaggcctctgaggaagtggagcttgagccctgcctggctcccagcctggagcagcaagagcaggagctgacagtagcccttgggcagcctgtgcgtctgtgctgtgggcgggctgagcgtggtggccactggtacaaggagggcagtcgcctggcacctgctggccgtgtacggggctggaggggccgcctagagattgccagcttcctacctgaggatgctggccgctacctctgcctggcacgaggctccatgatcgtcctgcagaatctcaccttgattacaggtgactccttgacctccagcaacgatgatgaggaccccaagtcccatagggacccctcgaataggcacagttacccccagcaagcaccctactggacacacccccagcgcatggagaagaaactgcatgcagtacctgcggggaacaccgtcaagttccgctgtccagctgcaggcaaccccacgcccaccatccgctggcttaaggatggacaggcctttcatggggagaaccgcattggaggcattcggctgcgccatcagcactggagtctcgtgatggagagcgtggtgccctcggaccgcggcacatacacctgcctggtagagaacgctgtgggcagcatccgctataactacctgctagatgtgctggagcggtccccgcaccggcccatcctgcaggccgggctcccggccaacaccacagccgtggtgggcagcgacgtggagctgctgtgcaaggtgtacagcgatgcccagccccacatccagtggctgaagcacatcgtcatcaacggcagcagcttcggagccgacggtttcccctatgtgcaagtcctaaagactgcagacatcaatagctcagaggtggaggtcctgtacctgcggaacgtgtcagccgaggacgcaggcgagtacacctgcctcgcaggcaattccatcggcctctcctaccagtctgcctggctcacggtgctgccagaggaggaccccacatggaccgcagcagcgcccgaggccaggtatacggacatcatcctgtacgcgtcgggctccctggccttggctgtgctcctgctgctggccgggctgtatcgagggcaggcgctccacggccggcacccccgcccgcccgccactgtgcagaagctctcccgcttccctctggcccgacagttctccctggagtcaggctcttccggcaagtcaagctcatccctggtacgaggcgtgcgtctctcctccagcggccccgccttgctcgccggcctcgtgagtctagatctacctctcgacccactatgggagttcccccgggacaggctggtgcttgggaagcccctaggcgagggctgctttggccaggtagtacgtgcagaggcctttggcatggaccctgcccggcctgaccaagccagcactgtggccgtcaagatgctcaaagacaacgcctctgacaaggacctggccgacctggtctcggagatggaggtgatgaagctgatcggccgacacaagaacatcatcaacctgcttggtgtctgcacccaggaagggcccctgtacgtgatcgtggagtgcgccgccaagggaaacctgcgggagttcctgcgggcccggcgccccccaggccccgacctcagccccgacggtcctcggagcagtgaggggccgctctccttcccagtcctggtctcctgcgcctaccaggtggcccgaggcatgcagtatctggagtcccggaagtgtatccaccgggacctggctgcccgcaatgtgctggtgactgaggacaatgtgatgaagattgctgactttgggctggcccgcggcgtccaccacattgactactataagaaaaccagcaacggccgcctgcctgtgaagtggatggcgcccgaggccttgtttgaccgggtgtacacacaccagagtgacgtgtggtcttttgggatcctgctatgggagatcttcaccctcgggggctccccgtatcctggcatcccggtggaggagctgttctcgctgctgcgggagggacatcggatggaccgacccccacactgccccccagagctgtacgggctgatgcgtgagtgctggcacgcagcgccctcccagaggcctaccttcaagcagctggtggaggcgctggacaaggtcctgctggccgtctctgaggagtacctcgacctccgcctgaccttcggaccctattccccctctggtggggacgccagcagcacctgctcctccagcgattctgtcttcagccacgaccccctgccattgggatccagctccttccccttcgggtctggggtgcagacatgagcaaggctcaaggctgtgcaggcacataggctggtggccttgggccttggggctcagccacagcctgacacagtgctcgaccttgatagcatggggcccctggcccagagttgctgtgccgtgtccaagggccgtgcccttgcccttggagctgccgtgcctgtgtcctgatggcccaaatgtcagggttctgctcggcttcttggaccttggcgcttagtccccatcccgggtttggctgagcctggctggagagctgctatgctaaacctcctgcctcccaataccagcaggaggttctgggcctctgaaccccctttccccacacctccccctgctgctgctgccccagcgtcttgacgggagcattggcccctgagcccagagaagctggaagcctgccgaaaacaggagcaaatggcgttttataaattatttttttgaaataaaaaaaaaaaaaaaaa

SEQ ID NO: 45 - DNA, 1679 bp, Homo sapiens
gccagaggcggagccgccgccctgccgcgactttcagactccgaccatggcctcgcgctggtggcggtggcggcgcggctgctcctggaagccggcggcgcggagccccgggcccggctcccccggccgtgcgggaccgttggggccgagcgccgctgccgaagtccgcgcgcaggttcataggcggaagggacttgacttgtctcagataccctatattaatcttgtgaagcatttaacatctgcctgtccaaatgtatgtcgtatatcacggtttcatcacacaaccccagacagtaaaacacacagtggtgaaaaatacaccgatcctttcaaactcggttggagagacttgaaaggtctgtatgaggacattagaaaggaactgcttatatcaacatcagaacttaaggaaatgtctgagtactactttgatgggaaagggaaagcctttcgaccaattattgtggcgctaatggcccgagcatgcaatattcatcataacaactcccgacatgtgcaagccagccagcgcgccatagccttaattgcagaaatgatccacactgctagtctggttcacgatgacgttattgacgatgcaagttctcgaagaggaaaacacacagttaataagatctggggtgaaaagaaggctgttcttgctggagatttaattctttctgcagcatctatagctctggcacgaattggaaatacaactgttatatctattttaacccaagttattgaagatttggtgcgtggtgaatttcttcagctcgggtcaaaagaaaatgagaatgaaagatttgcacactaccttgagaagacattcaagaagaccgccagcctgatagccaacagttgtaaagcagtctctgttctaggatgtcccgacccagtggtgcatgagatcgcctatcagtacggaaaaaatgtaggaatagcttttcagctaatagatgatgtattggacttcacctcgtgttctgaccagatgggcaaaccaacatcagctgatctgaagctcgggttagccactggtcctgtcctgtttgcctgtcagcagttcccagaaatgaatgctatgatcatgcgacggttcagtttgcctggagatgtagacagagctcgacagtatgtactacagagtgatggtgtgcaacaaacaacctacctcgcccagcagtactgccatgaagcaataagagagatcagtaaacttcgaccatccccagaaagagatgccctcattcagctttcagaaattgtactcacaagagataaatgacaactctttctgttctttctggcagctatcttaccagactgtgcctaaagaattttgtggaatacactttgtttgcttcatgtgcagataaccaaaaatcattttaaaagatatcaaacttattgatgggcaatttatttttttttattgcaaaagttttttcagaaaactttttaaatgtaattaataaaccacctgaatctgtcattctagtcctataaattataatcaaggtatcttgatggttatatgtggtattgtttacactgttaatatccacatgtaaggccattacacaaataaataaccaatgttaaaattcaaaaaaaaaaaaaaaaaaaaaaaaaaaaaaaaaaaaaaaaaaaaaaaaaaaaaaaaaaaaaaa

SEQ ID NO: 46 - DNA, 1695 bp, Homo sapiens
gaattccccaaaccctaaagctgatatcacaaagtaccatttctccaagttgggggctcagaggggagtcatcatgagcgatgttaccattgtgaaagaaggttgggttcagaagaggggagaatatataaaaaactggaggccaagatacttccttttgaagacagatggctcattcataggatataaagagaaacctcaagatgtggatttaccttatcccctcaacaacttttcagtggcaaaatgccagttaatgaaaacagaacgaccaaagccaaacacatttataatcagatgtctccagtggactactgttatagagagaacatttcatgtagatactccagaggaaagggaagaatggacagaagctatccaggctgtagcagacagactgcagaggcaagaagaggagagaatgaattgtagtccaacttcacaaattgataatataggagaggaagagatggatgcctctacaacccatcataaaagaaagacaatgaatgattttgactatttgaaactactaggtaaaggcacttttgggaaagttattttggttcgagagaaggcaagtggaaaatactatgctatgaagattctgaagaaagaagtcattattgcaaaggatgaagtggcacacactctaactgaaagcagagtattaaagaacactagacatccctttttaacatccttgaaatattccttccagacaaaagaccgtttgtgttttgtgatggaatatgttaatgggggcgagctgtttttccatttgtcgagagagcgggtgttctctgaggaccgcacacgtttctatggtgcagaaattgtctctgccttggactatctacattccggaaagattgtgtaccgtgatctcaagttggagaatctaatgctggacaaagatggccacataaaaattacagattttggactttgcaaagaagggatcacagatgcagccaccatgaagacattctgtggcactccagaatatctggcaccagaggtgttagaagataatgactatggccgagcagtagactggtggggcctaggggttgtcatgtatgaaatgatgtgtgggaggttacctttctacaaccaggaccatgagaaactttttgaattaatattaatggaagacattaaatttcctcgaacactctcttcagatgcaaaatcattgctttcagggctcttgataaaggatccaaataaacgccttggtggaggaccagatgatgcaaaagaaattatgagacacagtttcttctctggagtaaactggcaagatgtatatgataaaaagcttgtacctccttttaaacctcaagtaacatctgagacagatactagatattttgatgaagaatttacagctcagactattacaataacaccacctgaaaaatgtcagcaatcagattgtggcatgctgggtaactggaaaaaataataaaaatcggcttcctacagccagcagcacagtcacccatggaactgttggctttggattaaatgtggaattgaacgactacccagaagtgttctggaaagaagcgagatgtgtggcctgcctcaccgtcctcacccatcaaaagcaccagcaggcacgttaactcgaattctcacaaggaaaaggccattaaagctcaaggtgcatttcaaactccaggctac

SEQ ID NO: 47 - DNA, 1551 bp, Homo sapiens
gggcgtctccgccgcagctcggctcccgcgcgctcagcaccgccagcggcggccagatgcaggcggagcgaggagctcggggaggccgtgggcggcggccaggccgcggccggcctggcggagatcgccacagcgagcggcccggagccgcagcggcggtagccagaggcggcggcggaggcggcggcggggacggaggcggacgccggggccgtggccgtggccggggcttccgcggcgctcgcggaggccgaggaggaggaggcgccccgcgaggcagccgccgggagccgggaggctggggcgcaggggccagcgcgccggttgaagatgacagcgatgcagagacctatggagaagagaatgatgaacagggaaattattctaaaagaaagattgtctctaactgggatcgatatcaagatattgaaaaagaggtcaataatgaaagtggagagtcacagaggggaacagatttcagtgtcctccttagctctgcaggggactcattctcacagttccggtttgctgaggagaaagaatgggatagtgaagcttcttgtccaaaacagaattcagcattttatgtggatagtgagttattggttcgagcccttcaagagctgcctctctgcctccgactcaacgttgctgccgaactggtccagggtacagttcctttagaggttcctcaggtgaaaccaaagagaactgatgatggcaagggattagggatgcagttaaaggggcccttggggcctggaggaagggggcccatctttgagctgaaatctgtggctgctggctgccctgtgttgctgggcaaagacaacccaagcccgggtccttcaagggattctcagaaacccacttccccactgcagtcagcaggagaccatttggaagaagaactagatctgttgcttaatttagatgcacctataaaagagggagataacatcttaccagatcagacgtctcaggacctgaaatccaaggaagatggggaggtggtccaagaggaagaagtttgtgcaaaaccatctgtgactgaagaaaaaaacatggaacctgagcaaccaagtacctccaaaaatgttaccgaggaagagctggaagactggttggacagcatgatttcctaaaaaggggaaaaaaagtgcctgaagcaaatcttggttgccttctaacggcaggtgggcataaggctgtccttcaggaccagccagtttacaagcatgtctcaagctagtgtgttccattatgctcacagcagtaaatgcctacctctgtgtttgacatctgaaagaatacattgaagcagcttgttgcatttgtttttctggcttagtaatctaatagatttccttaagggcaggagatagactctggcccttgtttctagcctccttccttgcagtgtttacaacatagccagtgtttacagcatagcagatgctgctgctgattaagagaatagatgcaaacaaggcatgcatttggccaaaataaacaaatgctggtctgtccaaaaaaaaaaaaaaaaaaaaa

SEQ ID NO: 48 - DNA, 899 bp, Homo sapiens
agcctacgcacgaaagtgactaggaggaaggatattataaagtgatgcaaacagaaattccaccagcctccatgtatcatcatgtgtcataactcagtcaagctcagtgagcattctcagcacattgcctcaacagcttcaaggtgagccagctcaagactttgctctccaccaggcagaagatgacagactgtgaatttggatatatttacaggctggctcaggactatctgcagtgcgtcctacagataccacaacctggatcaggtccaagcaaaacgtccagagtgctacaaaatgttgcgttctcagtccaaaaagaagtggaaaagaatctgaagtcatgcttggacaatgttaatgttgtgtccgtagacactgccagaacactattcaaccaagtgatggaaaaggagtttgaagacggcatcattaactggggaagaattgtaaccatatttgcatttgaaggtattctcatcaagaaacttctacgacagcaaattgccccggatgtggatacctataaggagatttcatattttgttgcggagttcataatgaataacacaggagaatggataaggcaaaacggaggctgggaaaatggctttgtaaagaagtttgaacctaaatctggctggatgacttttctagaagttacaggaaagatctgtgaaatgctatctctcctgaagcaatactgttgaccagaaaggacactccatattgtgaaaccggcctaatttttctgactgatatggaaacgattgccaacacatacttctacttttaaataaacaactttgatgatgtaacttgaccttccagagttatggaaattttgtccccatgtaatgaataaattgtatgtatttttctctataaaaaaaaaaaaa

SEQ ID NO: 49 - DNA, 1561 bp, Homo sapiens
gcccgtacacaccgtgtgctgggacaccccacagtcagccgcatggctcccctgtgccccagcccctggctccctctgttgatcccggcccctgctccaggcctcactgtgcaactgctgctgtcactgctgcttctggtgcctgtccatccccagaggttgccccggatgcaggaggattcccccttgggaggaggctcttctggggaagatgacccactgggcgaggaggatctgcccagtgaagaggattcacccagagaggaggatccacccggagaggaggatctacctggagaggaggatctacctggagaggaggatctacctgaagttaagcctaaatcagaagaagagggctccctgaagttagaggatctacctactgttgaggctcctggagatcctcaagaaccccagaataatgcccacagggacaaagaaggggatgaccagagtcattggcgctatggaggcgacccgccctggccccgggtgtccccagcctgcgcgggccgcttccagtccccggtggatatccgcccccagctcgccgccttctgcccggccctgcgccccctggaactcctgggcttccagctcccgccgctcccagaactgcgcctgcgcaacaatggccacagtgtgcaactgaccctgcctcctgggctagagatggctctgggtcccgggcgggagtaccgggctctgcagctgcatctgcactggggggctgcaggtcgtccgggctcggagcacactgtggaaggccaccgtttccctgccgagatccacgtggttcacctcagcaccgcctttgccagagttgacgaggccttggggcgcccgggaggcctggccgtgttggccgcctttctggaggagggcccggaagaaaacagtgcctatgagcagttgctgtctcgcttggaagaaatcgctgaggaaggctcagagactcaggtcccaggactggacatatctgcactcctgccctctgacttcagccgctacttccaatatgaggggtctctgactacaccgccctgtgcccagggtgtcatctggactgtgtttaaccagacagtgatgctgagtgctaagcagctccacaccctctctgacaccctgtggggacctggtgactctcggctacagctgaacttccgagcgacgcagcctttgaatgggcgagtgattgaggcctccttccctgctggagtggacagcagtcctcgggctgctgagccagtccagctgaattcctgcctggctgctggtgacatcctagccctggtttttggcctcctttttgctgtcaccagcgtcgcgttccttgtgcagatgagaaggcagcacagaaggggaaccaaagggggtgtgagctaccgcccagcagaggtagccgagactggagcctagaggctggatcttggagaatgtgagaagccagccagaggcatctgagggggagccggtaactgtcctgtcctgctcattatgccacttccttttaactgccaagaaattttttaaaataaatatttataataaaaaaaaa

SEQ ID NO: 50 - DNA, 2413 bp, Homo sapiens
cttcttcgtcagcctcccttccaccgccatattgggccactaaaaaaagggggctcgtcttttcggggtgtttttctccccctcccctgtccccgcttgctcacggctctgcgactccgacgccggcaaggtttggagagcggctgggttcgcgggacccgcgggcttgcacccgcccagactcggacgggctttgccaccctctccgcttgcctggtcccctctcctctccgccctcccgctcgccagtccatttgatcagcggagactcggcggccgggccggggcttccccgcagcccctgcgcgctcctagagctcgggccgtggctcgtcggggtctgtgtcttttggctccgagggcagtcgctgggcttccgagaggggttcgggctgcgtaggggcgctttgttttgttcggttttgtttttttgagagtgcgagagaggcggtcgtgcagacccgggagaaagatgtcaaacgtgcgagtgtctaacgggagccctagcctggagcggatggacgccaggcaggcggagcaccccaagccctcggcctgcaggaacctcttcggcccggtggaccacgaagagttaacccgggacttggagaagcactgcagagacatggaagaggcgagccagcgcaagtggaatttcgattttcagaatcacaaacccctagagggcaagtacgagtggcaagaggtggagaagggcagcttgcccgagttctactacagacccccgcggccccccaaaggtgcctgcaaggtgccggcgcaggagagccaggatgtcagcgggagccgcccggcggcgcctttaattggggctccggctaactctgaggacacgcatttggtggacccaaagactgatccgtcggacagccagacggggttagcggagcaatgcgcaggaataaggaagcgacctgcaaccgacgattcttctactcaaaacaaaagagccaacagaacagaagaaaatgtttcagacggttccccaaatgccggttctgtggagcagacgcccaagaagcctggcctcagaagacgtcaaacgtaaacagctcgaattaagaatatgtttccttgtttatcagatacatcactgcttgatgaagcaaggaagatatacatgaaaattttaaaaatacatatcgctgacttcatggaatggacatcctgtataagcactgaaaaacaacaacacaataacactaaaattttaggcactcttaaatgatctgcctctaaaagcgttggatgtagcattatgcaattaggtttttccttatttgcttcattgtactacctgtgtatatagtttttaccttttatgtagcacataaactttggggaagggagggcagggtggggctgaggaactgacgtggagcggggtatgaagagcttgctttgatttacagcaagtagataaatatttgacttgcatgaagagaagcaattttggggaagggtttgaattgttttctttaaagatgtaatgtccctttcagagacagctgatacttcatttaaaaaaatcacaaaaatttgaacactggctaaagataattgctatttatttttacaagaagtttattctcatttgggagatctggtgatctcccaagctatctaaagtttgttagatagctgcatgtggcttttttaaaaaagcaacagaaacctatcctcactgccctccccagtctctcttaaagttggaatttaccagttaattactcagcagaatggtgatcactccaggtagtttggggcaaaaatccgaggtgcttgggagttttgaatgttaagaattgaccatctgcttttattaaatttgttgacaaaattttctcattttcttttcacttcgggctgtgtaaacacagtcaaaataattctaaatccctcgatatttttaaagatctgtaagtaacttcacattaaaaaatgaaatattttttaatttaaagcttactctgtccatttatccacaggaaagtgttatttttcaaggaaggttcatgtagagaaaagcacacttgtaggataagtgaaatggatactacatctttaaacagtatttcattgcctgtgtatggaaaaaccatttgaagtgtacctgtgtacataactctgtaaaaacactgaaaaattatactaacttatttatgttaaaagattttttttaatctagacaatatacaagccaaagtggcatgttttgtgcatttgtaaatgctgtgttgggtagaataggttttcccctcttttgttaaataatatggctatgcttaaaaggttgcatactgagccaagtataattttttgtaatgtgtgaaaaagatgccaattattgttacacattaagtaatcaataaagaaaacttccatagctatt

SEQ ID NO: 51 - DNA, 10640 bp, Homo sapiens
atactcagtcacacaagccatagcaggaaacagcgagcttgcagcctcaccgacgagtctcaactaaaagggactcccggagctaggggtggggactcggcctcacacagtgagtgccggctattggacttttgtccagtgacagctgagacaacaaggaccacgggaggaggtgtaggagagaagcgccgcgaacagcgatcgcccagcaccaagtccgcttccaggctttcggtttctttgcctccatcttgggtgcgccttcccggcgtctaggggagcgaaggctgaggtggcagcggcaggagagtccggccgcgacaggacgaactcccccactggaaaggattctgaaagaaatgaagtcagccctcagaaatgaagttgactgcctgctggctttctgttgactggcccggagctgtactgcaagacccttgtgagcttccctagtctaagagtaggatgtctgctgaagtcatccatcaggttgaagaagcacttgatacagatgagaaggagatgctgctctttttgtgccgggatgttgctatagatgtggttccacctaatgtcagggaccttctggatattttacgggaaagaggtaagctgtctgtcggggacttggctgaactgctctacagagtgaggcgatttgacctgctcaaacgtatcttgaagatggacagaaaagctgtggagacccacctgctcaggaaccctcaccttgtttcggactatagagtgctgatggcagagattggtgaggatttggataaatctgatgtgtcctcattaattttcctcatgaaggattacatgggccgaggcaagataagcaaggagaagagtttcttggaccttgtggttgagttggagaaactaaatctggttgccccagatcaactggatttattagaaaaatgcctaaagaacatccacagaatagacctgaagacaaaaatccagaagtacaagcagtctgttcaaggagcagggacaagttacaggaatgttctccaagcagcaatccaaaagagtctcaaggatccttcaaataacttcaggctccataatgggagaagtaaagaacaaagacttaaggaacagcttggcgctcaacaagaaccagtgaagaaatccattcaggaatcagaagcttttttgcctcagagcatacctgaagagagatacaagatgaagagcaagcccctaggaatctgcctgataatcgattgcattggcaatgagacagagcttcttcgagacaccttcacttccctgggctatgaagtccagaaattcttgcatctcagtatgcatggtatatcccagattcttggccaatttgcctgtatgcccgagcaccgagactacgacagctttgtgtgtgtcctggtgagccgaggaggctcccagagtgtgtatggtgtggatcagactcactcagggctccccctgcatcacatcaggaggatgttcatgggagattcatgcccttatctagcagggaagccaaagatgttttttattcagaactatgtggtgtcagagggccagctggaggacagcagcctcttggaggtggatgggccagcgatgaagaatgtggaattcaaggctcagaagcgagggctgtgcacagttcaccgagaagctgacttcttctggagcctgtgtactgcggacatgtccctgctggagcagtctcacagctcaccatccctgtacctgcagtgcctctcccagaaactgagacaagaaagaaaacgcccactcctggatcttcacattgaactcaatggctacatgtatgattggaacagcagagtttctgccaaggagaaatattatgtctggctgcagcacactctgagaaagaaacttatcctctcctacacataagaaaccaaaaggctgggcgtagtggctcacacctgtaatcccagcactttgggaggccaaggagggcagatcacttcaggtcaggagttcgagaccagcctggccaacatggtaaacgctgtccctagtaaaaatacaaaaattagctgggtgtgggtgtgggtacctgtattcccagttacttgggaggctgaggtgggaggatcttttgaacccaggagttcagggtcatagcatgctgtgattgtgcctacgaatagccactgcataccaacctgggcaatatagcaagatcccatctctttaaaaaaaaaaaaaaaggacaggaactatcttactcaatgtattagtcatgtttctctagagggacagaactaataggatacatgtatataaaaaggggagtttattaaggagtattgactcacatgatcacagggttaggtcccacaataggtcatctgcaagcaaggaagccaattcaagtcccaaagctgaagaacttggagtccaatgtttgagggcaggaagcattcagcatgagagaaagatggaggccagaagactacaccagtctagtctttccatgttttgcctgcttttattctggcagtgctggcagctgattagatggtgcccacccagattgaggatggtctgcctttcccagtccactgactcaaatgttaaatctcctttggcagcaccctcacagatgtacccgggaacactttgcatccttctattcaatcaagttgatactcagtattaaccatcacagtccatttgggcaactataccaaattaccatagaccaggtgacttaaacagcagttatttctcacagttccggaggctgggaaatccaacatctaagtggtagcatatctggtgtctggtaaggcatgcttccagatcttaccagatgtcagtcttttgatgttctcacatggcagaaaaagaggatgcaaactctcaagtatatctttaagggcacaaattccattcatgagggctctaccctcatcacctaattacctcccaaaggccccaccttctgatactgtcactttggggatactgtctcccctttgaattctggggggaatacaaacattcagtttgtaacaatagccttatgatttagaggttacttgttcattcacctagacctcaaattgcattttacagctagtcaagtatatctttctctgatttgatagtgtgacctaaaaggggaccattgtttgaaatatcattagagttgcttattattattattattattattattattattattattattattattgagacagagtttcattctgctgcccaggctggagtgcagtggcatcatcttggctcattgcaacctctgccttctgggttcaagcgattctcctgcctcagcctcccgagtagctgggattacaggctcctgccaccacacccggctaatttttgtatttttagtggagacagggtttccaccatgttggccagcgtggtcttgaactcctgacctcaggtgattcaccagcctcggcctcccaaagtgctgggattacaggtgtgagccactgcacctggcctattattatttttaaattttttttttttaattgatcattcttgggtgtttctcacagagggtgatttggcagggtcacaggacaatagtggagggaaggtcagcagataaacaagtgaacaaaggtctctggttttcctaggcagaggaccctgcggccttccgcagtgtttgtgtccctgggtacttgagattagggagtggtgatgactcttaaggagcatgctgccttcaagcatctgtttaacaaagcacatcttgcactgcccttaatccatttaaccctgagtggacacagcacatgtttcagagagcacagggttgggggtaaggtcatagatcaacagcatcctaaggcagaagaatttttcttagtacagaacaaaatgaagtctcccatgtctacttctttctacacagacacagcaacaatctgatttctctatcttttccccacctttcccccttttctattccacaaaaccgccatcgtcatcatggcctgttctcaatgagctgttgggtacacctcccagacggggtggcggctgggcagaggggctcctcacttcccagatggggcggccaggcggacgcgccccccacctccctcccggacgggatagctggccgggcgggggctgaccccccacctccctccccgacggggcggctggccgggcgggggctgacccccacgcctccctcccggacggggcggctgccaggcggaggggctcctcacttctcagacggggtggctgctgggcggagacgctcctcacttcccagacagggtggctgtcgggcggaggggctcctcacttctcagacggggcagctgcgggcggaggggctcctcacttctcagacggggtggccgggcagagaagctcctcacatcccagacgggggggcggggcagaggcgctccccacatctcagacgatgggcggccgggcagagacgctcctcacttcatcccagacggggtggcggccgggcagaagctgtaatctcggcaccctggggggccaaggcaggcggctgggaggcggaggccgtagccagctgagatcacaccactgcactccagcctgggcaacattgagcactgagtggacgagactctgcccgcaatcccggcacctcgggaggccgaggctggcagatcactcgcagtcaggagctggagaccagcccggccaacacagtgaaaccctgtctccaccaaaaaaatacgaaaaccagtcaggcgtggcggcgcccgcaatggcaggcacgcggcaggccgaggcgggagaatcaggcagggaggctgcagtgagccgagatggcagcagtacagtccagcttcggctcggcatcagagggagaccgtggggagagggagaagagagggagggggagagggctatttttaaaattttttaaaattgctgaacaggggtacctctgggcagtgtgtcagaataccactttttaaatattttatgatttatttatttttctatttcttgaggttttaactgatgtgtatctgtatgtctatttgtgtatattttgtcatgatcatgtaacagagtctgaaaagtgtcgaagagacagttttcaggaacaacaagcaattattcctactttccaagttattttgatgccatggtggctcatacctataatctgagtactttgggaggctgaggtggactgatcacttgagcccaggagtttgagaccagcctgggcaacatagcaagactccatctctacaaaaaaagacaaaatttagctgagcgtggtggcgtgttcctgtagtcccagctacttgggaggctgaagtgagtggatcccctgagcccagagaggtcaaggttgtgatgagctgtgatcacaccactgcacttcagcatgggagacagagtgagaccctgtttcagaaaaaataaataaataaaaccaccagcaccacaaacaacaacaaaaagttattttgtacttgttttgagcacaggactcctgagggtatctttgcatttaatattacataggggtgccagtgggaagtaatgtgtatgcttggcctcatgagctaaaaccctgtgttaattatgacagaaggaaagtgtgtgagagagatcttaactacctagcagctctagctgccatcttgaaccatgaagatacgggccacacgtaggggtagctgggtagtgagcagcaagaagccttgttggatgagggcacgaaggagcagaatcactggaatcactgtgtcagccctaattacctacctctggacttttatgtgaggggaaaaaaaattgacagtttatatttatctcaacctagttaacccaagtgatgcattgttatgagattaaaatgtttggaggccgggtgcggtggctcacgcctataatcccagccctttgggaggccaaggcgggcggatcacgaggtcaggagatcaagaccatcctggctaacatgtaaaaccccgtctctactaaaaatacaaaaaattagccaggcgttgtggcggtcgcctgtagtccctgctatttgggaggccgaggcaagagaacggcatgaacctgggaggtggagcttgcagcgagctgagatcttgccactgcactccagcctgggcgacagtgcgagactctgtctcaaaaataaataaataaataaataataaataaaatgtttggaatgttggcttcatccctgggatgcaaggctggttcaacatacgcaaatcaagaaacataattcatcacataaacagaactaaagacaaaaaccacatgattatctcaatagatacagaaaaggccttcaataaaattcaacgttgcttcatgttaaaaactctcaataaactaggtattgatggaaaatatctcaaaataataaccatttatgacaaacccacagccattatcatactgaatgggcaaaagctggaagcattccccttgaaaactggcacaagacagggatgccgtctcaccactcctatttaacatagtattggaagttctggccaagaaaatcaggcaagagaaacaaataaggggtattcaaataggaaaagaggaagtaaaactgtgtttgcagatgacatgatactatatctagaaaaccccattatctccacccaaaagttccttaagctgataagcaacttcagcaaagtctcaggatacaaaatcaatgtgcagaaatcacaagcattctatacaccaacaatacacaagcagagagccaaatcatgaatgaactcccattcacagttgctagaaagagaataaaatacctaggaatacagctaataagatgtgaaggatctcttcaaggagaactacaaaccactgctcaaggaaataagagaggacacaaatgaaaaaacattccattctcgtggataggaagaatcaatatcatgaaaatggccatactacccaaagtaatttataggttcattgctattcccattaaactactattgacattcttcacagaattagaaaaaaactactttaaaattcaaatggaaccaaaaaagagcccgtataaccaagacaacaataagcaaaaagaacaaagctggaagcatcacactacccaacttcaaagtatactgcaaggctacagtagccaaaatggcatggtactggtacaaaaacagacacatagaccaatggaacagaatagagaccagagaaagaagaccacacatctacagccatctgatcatcgacaaacctgacaaaaacaagcaatggggaaaagattccctatttaataaatggtgctgggaaaactggctagccatatgcagaaaattgaaactgaccccttccttacaccttatacaaaaattaactcaagattaaagacttaatgtaaaacctaaaactataaaaaccctagaagaaaatctatttaataccattcaagacataggcacaagcaaaggtttcatgacaaaaacatcaaaagcaattgcaacaaaagcaaaaattacaaatgggatctaattaaactaaagagctcctgcacagcaaaagaaactatcattagagtgaacaggcaacctacagaatgggagaacatttttgcaatctatccatctgacaaaggtctaatatccagaacctacaaggaacttaaaacaaatttacaaggaaaaaaacaaccccatcaaaaagtggacaaaggacatgaacagacacttctcaaaagaagacatttatgtggccaacaaacatataaaaaaaagctcaaccttactgatcattagagaaatgcaaaggagaaccacaatgagataccatctcatgccggtcagaatggtgattattaaaaagtcaaaaaacaacagatgctggcgaggctgtggagaagtaggaacacttttacattgttggtgggaatgtaaattagttcaaccgttgtggaagtgtgtgtggctattcctcaaagatctagaactagaaatactatttgtcccagcaatcccattactgggtatatacccaaaggaatataaaccattttattataaagatacatgcacatttttgttcattgcagcactcttcacaatagcaaagacacaatagcaaatgcccatcaaagatagactggataaagaaaatgtggtacatatacaccatggaatactgtgcagtgcagccattacagcttttggtgatacagtgaatcagatttttcattaattcttttaattggttattactgaacgtgaaaaagtaatgtttgtattgaaatcttgagtctggccatgtttctattttaaattcataaagaattctaacaagaggaattccaagaatgtcataaatggatgtttctccatggatgaaggaactgttttattcacttgctgataattcagcctaatccagtttgacatcatatagataagtagttgaattatggatttaaaatacatatcattttctaactccaaaggtaatacttatttaaatggttttgaaaatatagaaaggcacaatttctttttaaatctgttattctccaccaccactcaatctgtctatcatctatctctccattcattcttccatttgtttatatctgttaatctttgtatgtgttcatgtatagcttttacatgattggaatcataatgcatattccattttgaagtctgcttttttttacacaaaaatatgttgtgaatattttcctatattatgaaatatcattagctgagcttttagaattgactgcatgttttggtaccatttagatatagtttaagatacttagaagttatgtggctttgccactatggatgaatcttatttactcaatattaattacttacaaataacctcacctaaacactactcagccataaaaaggaatgaattaatgacattcacagcaacctggagactattactctaaaggaagtaactgaggaatggaaaaccaaacattgtatgttctcactcataagtgggagataagctatgaggatgcaaaggcataagaaggatacaatggactttggggacttaggggaaagggtgggaggggggtgaaggataaaagaatacaaattgggttcagtgtatactgctcaggtgatgggtgcaccagaatctcacaagtaaccacttaattacttacgcatgtaaccagataccacctgttccccaaacacctatggaaataattttgtttttttttttaaaaaaggaatgagatcatgtcctttgcagggacatggatgaagctggaagccattatcctcagcaaactaacagaggagcaggaaaccaaacaccacatgttctcacttgtaagcggaagctgaacaatgagaacacacggacacagggatgagatcaacacacactggggcctgatgcaggggccgtagcggggagagcatcaggataactagctaatgcatgtggggcttaatacctaggtgataggttgataggtgcagcaaaccaccatgggacacgtttacctatgtaacaaacccgcacatcctgcacttgtatccagaacttaaaatattttaaaaatctttagagaatacaaaaaaaaaaaaaaagattcttcaatgcatacacaataaaattgcagttcagtcaaacattggaagtctttctctgactgtctagttggtatcttcattttcagcttcttcaagatcccactccaaacactgttagctcagccaaattgaacagctcatatctcctacctctggatctttggttctggtgattgtatatttctggaccatctggaaccccagcatatcaccctaccccacatctccacatccccaaaatataaccatacttcaagggcagttcaaataccatctccttctatcctccatgaagtcagttatctcttccattggaattatcgccccctctcctgaacagtactatttcgtgtgaatctcctccaagccttcttttcattttatatctcatgctgtaattcttggaaagtatgctgtagctcaagtgcagaattctcatcagttttatctttatatctctcctaaacactttacctgatgaagagcctggcatacacataaatatatattgaatgaatcagtgatggattgaaaagagaaatgatggatctcctaaattttaacttttataaaatattttgatacattcatgaccttactttagcaagcaatgaacgtgatgtaaactattgttgatatagtttttatattggaagtgtaagtagtttgtggcatgggattgtgacatatcctaggtttcctcatcttctttttattgaaatgtaattcacaagccataaaatttgcccctttaaagtaaatgatgcagtggattttagtatatttacagagttgtgcaatcatcaccactatctaattccagaacatttccatctacctagaaactccataccagtgagctgccactctaatcctcctcttcccccagcctctagaaacaataatccattttctgtctctatgatttgcctgttctagatattttataaaaataaacatgtggcctttcgtgtctgacttccttcacttaaaaaaaaaaaaaaaaaa

SEQ ID NO: 52 - DNA, 1866 bp, Homo sapiens
tatttttggagaacattttgatttttttcatctctctctccccacccctaagattgtgcaaaaaaagcgtaccttgcctaattgaaataatttcattggattttgatcagaactgattatttggttttctgtgtgaagttttgaggtttcaaactttccttctggagaatgccttttgaaacaattttctctagctgcctgatgtcaactgcttagtaatcagtggatattgaaatattcaaaatgtacagagagtgggtagtggtgaatgttttcatgatgttgtacgtccagctggtgcagggctccagtaatgaacatggaccagtgaagcgatcatctcagtccacattggaacgatctgaacagcagatcagggctgcttctagtttggaggaactacttcgaattactcactctgaggactggaagctgtggagatgcaggctgaggctcaaaagttttaccagtatggactctcgctcagcatcccatcggtccactaggtttgcggcaactttctatgacattgaaacactaaaagttatagatgaagaatggcaaagaactcagtgcagccctagagaaacgtgcgtggaggtggccagtgagctggggaagagtaccaacacattcttcaagcccccttgtgtgaacgtgttccgatgtggtggctgttgcaatgaagagagccttatctgtatgaacaccagcacctcgtacatttccaaacagctctttgagatatcagtgcctttgacatcagtacctgaattagtgcctgttaaagttgccaatcatacaggttgtaagtgcttgccaacagccccccgccatccatactcaattatcagaagatccatccagatccctgaagaagatcgctgttcccattccaagaaactctgtcctattgacatgctatgggatagcaacaaatgtaaatgtgttttgcaggaggaaaatccacttgctggaacagaagaccactctcatctccaggaaccagctctctgtgggccacacatgatgtttgacgaagatcgttgcgagtgtgtctgtaaaacaccatgtcccaaagatctaatccagcaccccaaaaactgcagttgctttgagtgcaaagaaagtctggagacctgctgccagaagcacaagctatttcacccagacacctgcagctgtgaggacagatgcccctttcataccagaccatgtgcaagtggcaaaacagcatgtgcaaagcattgccgctttccaaaggagaaaagggctgcccaggggccccacagccgaaagaatccttgattcagcgttccaagttccccatccctgtcatttttaacagcatgctgctttgccaagttgctgtcactgtttttttcccaggtgttaaaaaaaaaatccattttacacagcaccacagtgaatccagaccaaccttccattcacaccagctaaggagtccctggttcattgatggatgtcttctagctgcagatgcctctgcgcaccaaggaatggagaggaggggacccatgtaatccttttgtttagttttgtttttgttttttggtgaatgagaaaggtgtgctggtcatggaatggcaggtgtcatatgactgattactcagagcagatgaggaaaactgtagtctctgagtcctttgctaatcgcaactcttgtgaattattctgattcttttttatgcagaatttgattcgtatgatcagtactgactttctgattactgtccagcttatagtcttccagtttaatgaactaccatctgatgtttcatatttaagtgtatttaaagaaaataaacaccattattcaagccatataaaaaaaaaaaaaaaaaa

SEQ ID NO: 53 - DNA, 7370 bp, Homo sapiens
ttttgtagataaatgtgaggattttctctaaatccctcttctgtttgctaaatctcactgtcactgctaaattcagagcagatagagcctgcgcaatggaataaagtcctcaaaattgaaatgtgacattgctctcaacatctcccatctctctggatttctttttgcttcattattcctgctaaccaattcattttcagactttgtacttcagaagcaatgggaaaaatcagcagtcttccaacccaattatttaagtgctgcttttgtgatttcttgaaggtgaagatgcacaccatgtcctcctcgcatctcttctacctggcgctgtgcctgctcaccttcaccagctctgccacggctggaccggagacgctctgcggggctgagctggtggatgctcttcagttcgtgtgtggagacaggggcttttatttcaacaagcccacagggtatggctccagcagtcggagggcgcctcagacaggcatcgtggatgagtgctgcttccggagctgtgatctaaggaggctggagatgtattgcgcacccctcaagcctgccaagtcagctcgctctgtccgtgcccagcgccacaccgacatgcccaagacccagaagtatcagcccccatctaccaacaagaacacgaagtctcagagaaggaaaggaagtacatttgaagaacgcaagtagagggagtgcaggaaacaagaactacaggatgtaggaagaccctcctgaggagtgaagagtgacatgccaccgcaggatcctttgctctgcacgagttacctgttaaactttggaacacctaccaaaaaataagtttgataacatttaaaagatgggcgtttcccccaatgaaatacacaagtaaacattccaacattgtctttaggagtgatttgcaccttgcaaaaatggtcctggagttggtagattgctgttgatcttttatcaataatgttctatagaaaagaaaaaaaaaatatatatatatatatatcttagtccctgcctctcaagagccacaaatgcatgggtgttgtatagatccagttgcactaaattcctctctgaatcttggctgctggagccattcattcagcaaccttgtctaagtggtttatgaattgtttccttatttgcacttctttctacacaactcgggctgtttgttttacagtgtctgataatcttgttagtctatacccaccacctcccttcataacctttatatttgccgaatttggcctcctcaaaagcagcagcaagtcgtcaagaagcacaccaattctaacccacaagattccatctgtggcatttgtaccaaatataagttggatgcattttattttagacacaaagctttatttttccacatcatgcttacaaaaaagaataatgcaaatagttgcaactttgaggccaatcatttttaggcatatgttttaaacatagaaagtttcttcaactcaaaagagttccttcaaatgatgagttaatgtgcaacctaattagtaactttcctctttttattttttccatatagagcactatgtaaatttagcatatcaattatacaggatatatcaaacagtatgtaaaactctgttttttagtataatggtgctattttgtagtttgttatatgaaagagtctggccaaaacggtaatacgtgaaagcaaaacaataggggaagcctggagccaaagatgacacaaggggaagggtactgaaaacaccatccatttgggaaagaaggcaaagtccccccagttatgccttccaagaggaacttcagacacaaaagtccactgatgcaaattggactggcgagtccagagaggaaactgtggaatggaaaaagcagaaggctaggaattttagcagtcctggtttctttttctcatggaagaaatgaacatctgccagctgtgtcatggactcaccactgtgtgaccttgggcaagtcacttcacctctctgtgcctcagtttcctcatctgcaaaatgggggcaatatgtcatctacctacctcaaaggggtggtataaggtttaaaaagataaagattcagattttttttaccctgggttgctgtaagggtgcaacatcagggcgcttgagttgctgagatgcaaggaattctataaataacccattcatagcatagctagagattggtgaattgaatgctcctgacatctcagttcttgtcagtgaagctatccaaataactggccaactagttgttaaaagctaacagctcaatctcttaaaacacttttcaaaatatgtgggaagcatttgattttcaatttgattttgaattctgcatttggttttatgaatacaaagataagtgaaaagagagaaaggaaaagaaaaaggagaaaaacaaagagatttctaccagtgaaaggggaattaattactctttgttagcactcactgactcttctatgcagttactacatatctagtaaaacctcgtttaatactataaataatattctattcattttgaaaaacacaatgattccttcttttctaggcaatataaggaaagtgatccaaaatttgaaatattaaaataatatctaataaaaagtcacaaagttatcttctttaacaaactttactcttattcttagctgtatatacatttttttaaaagtttgttaaaatatgcttgactagagtttccagttgaaaggcaaaaacttccatcacaacaagaaatttcccatgcctgctcagaagggtagcccctagctctctgtgaatgtgttttatccattcaactgaaaattggtatcaagaaagtccactggttagtgtactagtccatcatagcctagaaaatgatccctatctgcagatcaagattttctcattagaacaatgaattatccagcattcagatctttctagtcaccttagaactttttggttaaaagtacccaggcttgattatttcatgcaaattctatattttacattcttggaaagtctatatgaaaaacaaaaataacatcttcagtttttctcccactgggtcacctcaaggatcagaggccaggaaaaaaaaaaaaaagactccctggatctctgaatatatgcaaaaagaaggccccatttagtggagccagcaatcctgttcagtcaacaagtattttaactctcagtccaacattatttgaattgagcacctcaagcatgcttagcaatgttctaatcactatggacagatgtaaaagaaactatacatcatttttgccctctgcctgttttccagacatacaggttctgtggaataagatactggactcctcttcccaagatggcacttctttttatttcttgtccccagtgtgtaccttttaaaattattccctctcaacaaaactttataggcagtcttctgcagacttaacgtgttttctgtcatagttagatgtgataattctaagagtgtctatgacttatttccttcacttaattctatccacagtcaaaaatcccccaaggaggaaagctgaaagatgcactgccatattatctttcttaactttttccaacacataatcctctccaactggattataaataaattgaaaataactcattataccaattcactattttattttttaatgaattaaaactagaaaacaaattgatgcaaaccctggaagtcagttgattactatatactacagcagaatgactcagatttcatagaaaggagcaaccaaaatgtcacaacccaaaactttacaagctttgcttcagaattagattgctttataattcttgaatgaggcaatttcaagatatttgtaaaagaacagtaaacattggtaagaatgagctttcaactcataggcttatttccaatttaattgaccatactggatacttaggtcaaatttctgttctctcttccccaaataatattaaagtattatttgaactttttaagatgaggcagttcccctgaaaaagttaatgcagctctccatcagaatccactcttctagggatatgaaaatctcttaacacccaccctacatacacagacacacacacacacacacacacacacacacacacacacattcaccctaaggatccaatggaatactgaaaagaaatcacttccttgaaaattttattaaaaaacaaacaaacaaacaaaaagcctgtccacccttgagaatccttcctctccttggaacgtcaatgtttgtgtagatgaaaccatctcatgctctgtggctccagggtttctgttactattttatgcacttgggagaaggcttagaataaaagatgtagcacattttgctttcccatttattgtttggccagctatgccaatgtggtgctattgtttctttaagaaagtacttgactaaaaaaaaaagaaaaaaagaaaaaaaagaaagcatagacatatttttttaaagtataaaaacaacaattctatagatagatggcttaataaaatagcattaggtctatctagccaccaccacctttcaactttttatcactcacaagtagtgtactgttcaccaaattgtgaatttgggggtgcaggggcaggagttggaaattttttaaagttagaaggctccattgttttgttggctctcaaacttagcaaaattagcaatatattatccaatcttctgaacttgatcaagagcatggagaataaacgcgggaaaaaagatcttataggcaaatagaagaatttaaaagataagtaagttccttattgatttttgtgcactctgctctaaaacagatattcagcaagtggagaaaataagaacaaagagaaaaaatacatagatttacctgcaaaaaatagcttctgccaaatcccccttgggtattctttggcatttactggtttatagaagacattctcccttcacccagacatctcaaagagcagtagctctcatgaaaagcaatcactgatctcatttgggaaatgttggaaagtatttccttatgagatgggggttatctactgataaagaaagaatttatgagaaattgttgaaagagatggctaacaatctgtgaagattttttgtttcttgtttttgttttttttttttttttactttatacagtctttatgaatttcttaatgttcaaaatgacttggttcttttcttctttttttatatcagaatgaggaataataagttaaacccacatagactctttaaaactataggctagatagaaatgtatgtttgacttgttgaagctataatcagactatttaaaatgttttgctatttttaatcttaaaagattgtgctaatttattagagcagaacctgtttggctctcctcagaagaaagaatctttccattcaaatcacatggctttccaccaatattttcaaaagataaatctgatttatgcaatggcatcatttattttaaaacagaagaattgtgaaagtttatgcccctcccttgcaaagaccataaagtccagatctggtaggggggcaacaacaaaaggaaaatgttgttgattcttggttttggattttgttttgttttcaatgctagtgtttaatcctgtagtacatatttgcttattgctattttaatattttataagaccttcctgttaggtattagaaagtgatacatagatatcttttttgtgtaatttctatttaaaaaagagagaagactgtcagaagctttaagtgcatatggtacaggataaagatatcaatttaaataaccaattcctatctggaacaatgcttttgttttttaaagaaacctctcacagataagacagaggcccaggggatttttgaagctgtctttattctgcccccatcccaacccagcccttattattttagtatctgcctcagaattttatagagggctgaccaagctgaaactctagaattaaaggaacctcactgaaaacatatatttcacgtgttccctctttttttttttcctttttgtgagatggggtctcgcactgtcccccaggctggagtgcagtggcatgatctcggctcactgcaacctccacctcctgggtttaagcgattctcctgcctcagcctcctgagtagctgggattacaggcacccaccactatgcccggctaattttttggatttttaatagagacggggttttaccatgttggccaggttggtctcaaactcctgaccttgtgatttgcccgcctcagcctcccaaattgctgggattacaggcatgagccaccacaccctgcccatgtgttccctcttaatgtatgattacatggatcttaaacatgatccttctctcctcattcttcaactatctttgatggggtctttcaaggggaaaaaaatccaagcttttttaaagtaaaaaaaaaaaaagagaggacacaaaaccaaatgttactgctcaactgaaatatgagttaagatggagacagagtttctcctaataaccggagctgaattacctttcactttcaaaaacatgaccttccacaatccttagaatctgcctttttttatattactgaggcctaaaagtaaacattactcattttattttgcccaaaatgcactgatgtaaagtaggaaaaataaaaacagagctctaaaatccctttcaagccacccattgaccccactcaccaactcatagcaaagtcacttctgttaatcccttaatctgattttgtttggatatttatcttgtacccgctgctaaacacactgcaggagggactctgaaacctcaagctgtctacttacatcttttatctgtgtctgtgtatcatgaaaatgtctattcaaaatatcaaaacctttcaaatatcacgcagcttatattcagtttacataaaggccccaaataccatgtcagatctttttggtaaaagagttaatgaactatgagaattgggattacatcatgtattttgcctcatgtatttttatcacacttataggccaagtgtgataaataaacttacagacactgaattaatttcccctgctactttgaaaccagaaaataatgactggccattcgttacatctgtcttagttgaaaagcatattttttattaaattaattctgattgtatttgaaattattattcaattcacttatggcagaggaatatcaatcctaatgacttctaaaaatgtaactaattgaatcattatcttacatttactgtttaataagcatattttgaaaatgtatggctagagtgtcataataaaatggtatatctttctttagtaattacattaaaattagtcatgtttgattaattagttc

SEQ ID NO: 54 - DNA, 6889 bp, Homo sapiens
gcactgcgaacgccggctgagctgagtctcgctgctcggtgcgaggcggcggagagcgaggcctggtgagcaccgccgaggcgcgggccagctcttcgaggttgtgcgcgggagtggcacggcgggcgggcgagcgaggggctaacttcagcggtggcaccgggatcggttgccttgagcctgaaatcatgaccaccccaggaaaagagaactttcgcctgaaaagttacaagaacaaatctctgaatcccgatgagatgcgcaggaggagggaggaagaaggactgcagttacgaaagcagaaaagagaagagcagttattcaagcggagaaatgttgctacagcagaagaagaaacagaagaagaagttatgtcagatggaggctttcatgaggctcagattagtaacatggagatggcaccaggtggtgtcatcacttctgacatgattgaaatgatattttccaaaagcccagagcaacagctttcagcaacacagaaattcaggaagctgctttcaaaagaacctaaccctcctattgatgaagttatcagcacaccaggagtagtggccaggtttgtggagttcctcaaacgaaaagagaattgtacactgcagtttgaatcagcttgggtactgacaaatattgcttcaggaaattctcttcagacccgaattgtgattcaggcaggagctgtgcccatcttcatagagttgctcagctcagagtttgaagatgtccaggaacaggcagtctgggctcttggcaacattgctggagatagtaccatgtgcagggactatgtcttagactgcaatatccttccccctcttttgcagttattttcaaagcaaaaccgcctgaccatgacccggaatgcagtatgggctttgtctaatctctgtagagggaaaagtccacctccagaatttgcaaaggtttctccatgtctgaatgtgctttcctggttgctgtttgtcagtgacactgatgtactggctgatgcctgctgggccctctcatatctatcagatggacccaatgataaaattcaagcggtcatcgatgcgggagtatgtaggagacttgtggaactgctgatgcataatgattataaagtggtttctcctgctttgcgagctgtgggaaacattgtcacaggggatgatattcagacacaggtaattctgaattgctcagctctgcagagtttattgcatttgctgagtagcccaaaggaatctatcaaaaaggaagcatgttggacgatatctaatattacagctggaaatagggcacagatccagactgtgatagatgccaacattttcccagccctcattagtattttacaaactgctgaatttcggacaagaaaagaagcagcttgggccatcacaaatgcaacttctggaggatcagctgaacagatcaagtacctagtagaactgggttgtatcaagccgctctgtgatctcctcacggtcatggactctaagattgtacaggttgccctaaatggcttggaaaatatcctgaggcttggagaacaggaagccaaaaggaatggcactggcattaacccttactgtgctttgattgaagaagcttatggtctggataaaattgagttcttacagagtcatgaaaaccaggagatctaccaaaaggcctttgatcttattgagcattacttcgggaccgaagatgaagacagcagcattgcaccccaggttgaccttaaccagcagcagtacatcttccaacagtgtgaggctcctatggaaggtttccagctttgaagcaatactctgctttcacgtacctgtgtcagaccaggctacccagtcgagtcctcttgtggagcccacagtcctcatggagctaacttctcaaatgttttccataatactgtttgcgctcatttgcttgccttgcgcacctgctctcttacacacatctggaaaacctccggctctctgtggtggaatacccttctaataaaagggtaaccagaacggcccactctcttttacggaaaaatccctaggctttggagatccgcacttacattagagttatgggaatatacacatattaatgtggctccctttttcttgtgggggaataaaagaggactcctcctcattccctttaacatgggggaaaaaactgacattaaaagatgagactaaatctttatcttgaattttacacaactacttacgacaagggagatgtttagacctgttgtgtatacttcagagtacttttcatgagttcttccacagtgaacccttggattacctggtggctttttctagccagatttgcattaatccttactgagattggatggttttctttcctctattggcgccattcttcagatattaaagttaaaccatccactccctcaccttcagccttcagtgaatgtgctttctagttgtcaggaatgctgaagaattaacactttgactcctaaatgtgatactggtttgtagattcccttagagcagaaaggagaggggcacatattaatttgtatcgcttttgcttctctttggtcttttgtgtcttagaatttggaagtggttcatttctgttgctggtatgaggatttcgaatacttagtaatcgaaaaccatatcctgtaatttaataaaaaaaactaaggacgaaaaaaccctccaattttcccaaatgcaatcagtgtaactaggggctgtgtttctgcattaaaataaatgtttcaggctttgtggtcctgatcaaggtcctcattaaaaaattggagttcaccctaggtgcttttcccctctgtgactggcagataacacatacttttgaaagtaactttgggatttttttcttaggtgcagctcgattctaatcttttcatgctgcacacgattcctttaatgtagcatccttatctgaaagaaataaccatcttctcaacatgacctgcttaacccaaataagaacagtgatcttataacctcattgtttcctaatcattttatttcatctcctgctagtactgtgccgcttccccctccccccacacaaaataaaaacagtatctgccttctggctcatttaatgatgactgcaatctgtacctgcaaatggcgcttccagtactgtgttcagtgatccacatttgtgcttggactggaatgaaaaaatacgcttaattgccaagacaactgcaaatgagttcaatacgacttctcggtgctagttggccatcttgactcaatgttgggatacactaccagagaagatttttttgttgatgtgctgttcaaagtgaattctgaaggaaaaggttgctcacctctgtttcagagcatacccttttaaacctttttagacttgtcctcttctagaattcattataaccccaaagtgtaaaaactatttggaagttgcccctgacaagctattatacatctctggtaaatcctgctgaatgtaagggatattcagagcttttcatacctcatcatgatgttatttaagcagccaacttatgtgacctgatttaaacttttaaaaaatccacttcattcaaactagaaagagtcaaagacaaaggacatttatcagccaagagtgtgacgcattcttcgcatctagtctgtagtagtgtctgtgctctgggatggataccgtctgatgtctgtttgttattgatggcgcagccactgcaaaactagtcaactcccatctataactgttactttttctagtgctgctttgtgctgagagaacattttagtttactgcacttgacctgtaaaagactgattctttgtaattttagggataaattaggtggttaatttaaagaagaaatttcaatgttgcctttacatcacattaaaatataacttctttcagaaggataatagaagcactgattcatagtaaaaatcttgtttttagctttgacttttttgtggctgttttttaaaattgtaaattactagtaacatgtcatttctataggatgttttaaattatgtaccttccattggatagttaaaataatttcattttataagccaatttgagtgggaaagatacaaagcacacagttgtctccccacattaggaagagtagtgtgcattcagacattcggaatttttgctagtagttggagatgtttcagtgagtgaattaaaacaaagtctatttaactgacgtgatctattttgtgtctaaaacagaggaatttatcttgtcctagaagttcatgaactataagatctaagtttttttttcttttttaacaataaaatgattttttcttaaagtatcaaagttggaattggctaaaagtgaagtagcataactcagatatgttggaacttggtactgaagcaggctttttggtaacagaaatgacattttaaggggtaactgtatatcctgtttttagttctttgcctctcagattctgttaacttagtttaaattcactgaataccctaccactaaggcgttgctcattacaaaagcatgttaatttcaatacaggaaaactcttttgtagttttatatatggattggggaaagtgactttgttttacttttcctttttattcccctccatcctccaaacttccaatctatattatttgtaatgagaactttggtgggggaaaaaaagcattaagagaattttggatgtaaaggcatctggtatctgatggaccagcaggtagatgtggttggattgagaaattttgggtaaggtagatgatagaagaaagagattttaggagacacagttctctgtggaacactttctttcatgttcctgtaactaattgatcaagacccttttaaacgcttatctttgtcagttccgcttttgaaaaaactattgccctaggattgtttcttccatatgacagatgaaggttattggctctgagtcatttttggcattatcgtcacagataaaaagattggcaattaatctcataaaaaatctgaattattccagattgctgccgatttttgcctaagaaacaatatgtaagtatattttataaaccaaactttgtcaaccaattctattgtacgtctacccacaggcaactttgaatttacttctctagtgctaaataaacatttcagcgatttaatcccccaacttgggggatgcattatgaaaaggttttcctggagtcaaggggtttttctttctcgctagttttgtgaaaatttttatatcaataggcaaatcattataactttttaggggttgatggtttttaagtatattggaaattgtggtgtctaaggatgatgttcagtgaagaaaagggatccacttttagaaaccagcattgtttgctttcaactttcatactgtatgctaactcctacgttccaaaatgtgctcatttgcagacacaggtatgcctatatacatggaagtctcaaatctgaatttttatccatctcaatatgaccatttctctctgttgtgagctgaacagattaagtatatatctgccaggttgggaaatattttggtctatcttttcctgtcatcagaacttaatttaaaaaaattatcaaaggtcagatgtgactactacagtaagttggctatcataaagaatattccataaaatgttttatctgccatacaaaattactgggtttatggccggatgtggtggctcatgcctgtaatcccagcagttcaggattacaggttatatacaggttataacaatggataccaggacatcagaatatctgataaagcaaatatttatatgctaatttaaaatatcaaattgctactggacataaaatacatctggaagcttggggtaagaagaaagaaaagaagtgttccgttctgttttcaactaagggtaaacgaagtcccagagtgttttccctgtaggtcaaattaaggtaacatgtctttatttgatcatctattgtacaccagatacctggctaagggctttccttttttctcatgtagtcttccaaatgttctttgataattgtcactatattatagatgacaaagtgaagacttacgagaaattactttgccccaaggttacaacacttagatggctgtccaagggcggggaagagccctgcaaattctgtgtcttgaagaaagcagtggccacgcagtagttccgtgcccaggatctcccagaactagacttggcaaccacagctgggccagccttttttgttagaccattcttcctgactcctgcttaccatcagcacccttaaaatgacgaaatcaggcttaagttgcttttaggttacacagactggagtgtaggccctctcaggccaaacatctttcctcttctgtggtgctaaaattctgtatgaccagacaagtatggtaataggttttttttttttttttttttgtgcaaatgattttgtgtttagtaaaataatggctaaacacatggatccattcaaacgcacaaatgtggaaagtattgacacggaaggaaaggctttgaagaattactgcctcaggaagcagtgccatggatgcgaatttaacacagtctacttcttcctaaaggaatatcatcccaaggaatgtcaaaaattaaaatcaccttttaatgtactggttgttgagtgtttctgctttacctcaagtcattctgaccactctacatcctgcttcaaagtgttctgacacttagatttggaatggctctaatgattctttgtacttgaatgtggtctgtcaggccatgggtgagtgccttgcacatagtagacattcaataaatactaaatgaaggaatatgcatgcatctttgtgatgttagtaaagggtgcttgataaaagaaaat

SEQ ID NO: 55 - DNA, 5436 bp, Homo sapiens
ggccgcggcggcggaggcagcagcggcggcggcagtggcggcggcgaaggtggcggcggctcggccagtactcccggcccccgccatttcggactgggagcgagcgcggcgcaggcactgaaggcggcggcggggccagaggctcagcggctcccaggtgcgggagagaggcctgctgaaaatgactgaatataaacttgtggtagttggagctggtggcgtaggcaagagtgccttgacgatacagctaattcagaatcattttgtggacgaatatgatccaacaatagaggattcctacaggaagcaagtagtaattgatggagaaacctgtctcttggatattctcgacacagcaggtcaagaggagtacagtgcaatgagggaccagtacatgaggactggggagggctttctttgtgtatttgccataaataatactaaatcatttgaagatattcaccattatagagaacaaattaaaagagttaaggactctgaagatgtacctatggtcctagtaggaaataaatgtgatttgccttctagaacagtagacacaaaacaggctcaggacttagcaagaagttatggaattccttttattgaaacatcagcaaagacaagacagagagtggaggatgctttttatacattggtgagggagatccgacaatacagattgaaaaaaatcagcaaagaagaaaagactcctggctgtgtgaaaattaaaaaatgcattataatgtaatctgggtgttgatgatgccttctatacattagttcgagaaattcgaaaacataaagaaaagatgagcaaagatggtaaaaagaagaaaaagaagtcaaagacaaagtgtgtaattatgtaaatacaatttgtacttttttcttaaggcatactagtacaagtggtaatttttgtacattacactaaattattagcatttgttttagcattacctaatttttttcctgctccatgcagactgttagcttttaccttaaatgcttattttaaaatgacagtggaagtttttttttcctctaagtgccagtattcccagagttttggtttttgaactagcaatgcctgtgaaaaagaaactgaatacctaagatttctgtcttggggtttttggtgcatgcagttgattacttcttatttttcttaccaattgtgaatgttggtgtgaaacaaattaatgaagcttttgaatcatccctattctgtgttttatctagtcacataaatggattaattactaatttcagttgagaccttctaattggtttttactgaaacattgagggaacacaaatttatgggcttcctgatgatgattcttctaggcatcatgtcctatagtttgtcatccctgatgaatgtaaagttacactgttcacaaaggttttgtctcctttccactgctattagtcatggtcactctccccaaaatattatattttttctataaaaagaaaaaaatggaaaaaaattacaaggcaatggaaactattataaggccatttccttttcacattagataaattactataaagactcctaatagcttttcctgttaaggcagacccagtatgaaatggggattattatagcaaccattttggggctatatttacatgctactaaatttttataataattgaaaagattttaacaagtataaaaaattctcataggaattaaatgtagtctccctgtgtcagactgctctttcatagtataactttaaatcttttcttcaacttgagtctttgaagatagttttaattctgcttgtgacattaaaagattatttgggccagttatagcttattaggtgttgaagagaccaaggttgcaaggccaggccctgtgtgaacctttgagctttcatagagagtttcacagcatggactgtgtccccacggtcatccagtgttgtcatgcattggttagtcaaaatggggagggactagggcagtttggatagctcaacaagatacaatctcactctgtggtggtcctgctgacaaatcaagagcattgcttttgtttcttaagaaaacaaactcttttttaaaaattacttttaaatattaactcaaaagttgagattttggggtggtggtgtgccaagacattaattttttttttaaacaatgaagtgaaaaagttttacaatctctaggtttggctagttctcttaacactggttaaattaacattgcataaacacttttcaagtctgatccatatttaataatgctttaaaataaaaataaaaacaatccttttgataaatttaaaatgttacttattttaaaataaatgaagtgagatggcatggtgaggtgaaagtatcactggactaggaagaaggtgacttaggttctagataggtgtcttttaggactctgattttgaggacatcacttactatccatttcttcatgttaaaagaagtcatctcaaactcttagttttttttttttacaactatgtaatttatattccatttacataaggatacacttatttgtcaagctcagcacaatctgtaaatttttaacctatgttacaccatcttcagtgccagtcttgggcaaaattgtgcaagaggtgaagtttatatttgaatatccattctcgttttaggactcttcttccatattagtgtcatcttgcctccctaccttccacatgccccatgacttgatgcagttttaatacttgtaattcccctaaccataagatttactgctgctgtggatatctccatgaagttttcccactgagtcacatcagaaatgccctacatcttatttcctcagggctcaagagaatctgacagataccataaagggatttgacctaatcactaattttcaggtggtggctgatgctttgaacatctctttgctgcccaatccattagcgacagtaggatttttcaaacctggtatgaatagacagaaccctatccagtggaaggagaatttaataaagatagtgctgaaagaattccttaggtaatctataactaggactactcctggtaacagtaatacattccattgttttagtaaccagaaatcttcatgcaatgaaaaatactttaattcatgaagcttactttttttttttggtgtcagagtctcgctcttgtcacccaggctggaatgcagtggcgccatctcagctcactgcaacctccatctcccaggttcaagcgattctcgtgcctcggcctcctgagtagctgggattacaggcgtgtgccactacactcaactaatttttgtatttttaggagagacggggtttcaccctgttggccaggctggtctcgaactcctgacctcaagtgattcacccaccttggcctcataaacctgttttgcagaactcatttattcagcaaatatttattgagtgcctaccagatgccagtcaccgcacaaggcactgggtatatggtatccccaaacaagagacataatcccggtccttaggtagtgctagtgtggtctgtaatatcttactaaggcctttggtatacgacccagagataacacgatgcgtattttagttttgcaaagaaggggtttggtctctgtgccagctctataattgttttgctacgattccactgaaactcttcgatcaagctactttatgtaaatcacttcattgttttaaaggaataaacttgattatattgtttttttatttggcataactgtgattcttttaggacaattactgtacacattaaggtgtatgtcagatattcatattgacccaaatgtgtaatattccagttttctctgcataagtaattaaaatatacttaaaaattaatagttttatctgggtacaaataaacaggtgcctgaactagttcacagacaaggaaacttctatgtaaaaatcactatgatttctgaattgctatgtgaaactacagatctttggaacactgtttaggtagggtgttaagacttacacagtacctcgtttctacacagagaaagaaatggccatacttcaggaactgcagtgcttatgaggggatatttaggcctcttgaatttttgatgtagatgggcatttttttaaggtagtggttaattacctttatgtgaactttgaatggtttaacaaaagatttgtttttgtagagattttaaagggggagaattctagaaataaatgttacctaattattacagccttaaagacaaaaatccttgttgaagtttttttaaaaaaagctaaattacatagacttaggcattaacatgtttgtggaagaatatagcagacgtatattgtatcatttgagtgaatgttcccaagtaggcattctaggctctatttaactgagtcacactgcataggaatttagaacctaacttttataggttatcaaaactgttgtcaccattgcacaattttgtcctaatatatacatagaaactttgtggggcatgttaagttacagtttgcacaagttcatctcatttgtattccattgattttttttttcttctaaacattttttcttcaaacagtatataactttttttaggggatttttttttagacagcaaaaactatctgaagatttccatttgtcaaaaagtaatgatttcttgataattgtgtagtaatgttttttagaacccagcagttaccttaaagctgaatttatatttagtaacttctgtgttaatactggatagcatgaattctgcattgagaaactgaatagctgtcataaaatgaaactttctttctaaagaaagatactcacatgagttcttgaagaatagtcataactagattaagatctgtgttttagtttaatagtttgaagtgcctgtttgggataatgataggtaatttagatgaatttaggggaaaaaaaagttatctgcagatatgttgagggcccatctctccccccacacccccacagagctaactgggttacagtgttttatccgaaagtttccaattccactgtcttgtgttttcatgttgaaaatacttttgcatttttcctttgagtgccaatttcttactagtactatttcttaatgtaacatgtttacctggaatgtattttaactatttttgtatagtgtaaactgaaacatgcacattttgtacattgtgctttcttttgtgggacatatgcagtgtgatccagttgttttccatcatttggttgcgctgacctaggaatgttggtcatatcaaacattaaaaatgaccactcttttaattgaaattaacttttaaatgtttataggagtatgtgctgtgaagtgatctaaaatttgtaatatttttgtcatgaactgtactactcctaattattgtaatgtaataaaaatagttacagtgacaaaaaaaaaaaaaaa

SEQ ID NO: 56 - DNA, 4812 bp, Homo sapiens
gcgctccagacaagatggcgcggccggtccggggagggctcggggccccgcgccgctcgccttgccttctccttctctggctgcttttgcttcggctggagccggtgaccgccgcggccggcccgcgggcgccctgcgcggccgcctgcacttgcgctggggactcgctggactgcggtgggcgcgggctggctgcgttgcccggggacctgccctcctggacgcggagcctaaacctgagttacaacaaactctctgagattgaccctgctggttttgaggacttgccgaacctacaggaagtgtacctcaataataatgagttgacagcggtaccatccctgggcgctgcttcatcacatgtcgtctctctctttctgcagcacaacaagattcgcagcgtggaggggagccagctgaaggcctacctttccttagaagtgttagatctgagtttgaacaacatcacggaagtgcggaacacctgctttccacacggaccgcctataaaggagctcaacctggcaggcaatcggattggcaccctggagttgggagcatttgatggtctgtcacggtcgctgctaactcttcgcctgagcaaaaacaggatcacccagcttcctgtaagagcattcaagctacccaggctgacacaactggacctcaatcggaacaggattcggctgatagagggcctcaccttccaggggctcaacagcttggaggtgctgaagcttcagcgaaacaacatcagcaaactgacagatggggccttctggggactgtccaagatgcatgtgctgcacctggagtacaacagcctggtagaagtgaacagcggctcgctctacggcctcacggccctgcatcagctccacctcagcaacaattccatcgctcgcattcaccgcaagggctggagcttctgccagaagctgcatgagttggtcctgtccttcaacaacctgacacggctggacgaggagagcctggccgagctgagcagcctgagtgtcctgcgtctcagccacaattccatcagccacattgcggagggtgccttcaagggactcaggagcctgcgagtcttggatctggaccataacgagatttcgggcacaatagaggacacgagcggcgccttctcagggctcgacagcctcagcaagctgactctgtttggaaacaagatcaagtctgtggctaagagagcattctcggggctggaaggcctggagcacctgaaccttggagggaatgcgatcagatctgtccagtttgatgcctttgtgaagatgaagaatcttaaagagctccatatcagcagcgacagcttcctgtgtgactgccagctgaagtggctgcccccgtggctaattggcaggatgctgcaggcctttgtgacagccacctgtgcccacccagaatcactgaagggtcagagcattttctctgtgccaccagagagtttcgtgtgcgatgacttcctgaagccacagatcatcacccagccagaaaccaccatggctatggtgggcaaggacatccggtttacatgctcagcagccagcagcagcagctcccccatgacctttgcctggaagaaagacaatgaagtcctgaccaatgcagacatggagaactttgtccacgtccacgcgcaggacggggaagtgatggagtacaccaccatcctgcacctccgtcaggtcactttcgggcacgagggccgctaccaatgtgtcatcaccaaccactttggctccacctattcacataaggccaggctcaccgtgaatgtgttgccatcattcaccaaaacgccccacgacataaccatccggaccaccaccatggcccgcctcgaatgtgctgccacaggtcacccaaaccctcagattgcctggcagaaggatggaggcacggatttccccgctgcccgtgagcgacgcatgcatgtcatgccggatgacgacgtgtttttcatcactgatgtgaaaatagatgacgcaggggtttacagctgtactgctcagaactcagccggttctatttcagctaatgccaccctgactgtcctagagaccccatccttggtggtccccttggaagaccgtgtggtatctgtgggagaaacagtggccctccaatgcaaagccacggggaaccctccgccccgcatcacctggttcaagggggaccgcccgctgagcctcactgagcggcaccacttgacccctgacaaccagctcctggtggttcagaacgtggtggcagaggatgcgggccgatatacctgtgagatgtccaacaccctgggcacggagcgagctcacagccagctgagcgtcctgcccgcagcaggctgcaggaaggatgggaccacggtaggcatcttcaccattgctgtcgtgagcagcatcgtcctgacgtcactggtctgggtgtgcatcatctaccagaccaggaagaagagtgaagagtacagtgtcaccaacacagatgaaaccgtcgtgccaccagatgttccaagctacctctcttctcaggggaccctttctgaccgacaagaaaccgtggtcaggaccgagggtggccctcaggccaatgggcacattgagagcaatggtgtgtgtccaagagatgcaagccactttccagagcccgacactcacagcgttgcctgcaggcagccaaagctctgtgctgggtctgcgtatcacaaagagccgtggaaagcgatggagaaagctgaagggacacctgggccacataagatggaacacggtggccgggtcgtatgcagtgactgcaacaccgaagtggactgttactccaggggacaagccttccacccccagcctgtgtccagagacagcgcacagccaagtgcgccaaatggcccggagccgggtgggagtgaccaagagcattctccacatcaccagtgcagcaggactgccgctgggtcctgccccgagtgccaagggtcgctctaccccagtaaccacgatagaatgctgacggctgtgaagaaaaagccaatggcatctctagatgggaaaggggattcttcctggactttagcaaggttgtatcacccggactccacagagctacagcctgcatcttcattaacttcaggcagtccagagcgcgcggaagcccagtacttgcttgtttccaatggccacctccccaaagcatgtgacgccagtcccgagtccacgccactgacaggacagctccccgggaaacagagggtgccactgctgttggcaccaaaaagctaggttttgtctacctcagttcttgtcataccaatctctacgggaaagagaggtaggagaggctgcgaggaagcttgggttcaagcgtcactcatctgtacatagttgtaactcccatgtggagtatcagtcgctcacaggacttggatctgaagcacagtaaacgcaagaggggatttgtgtacaaaaggcaaaaaaagtatttgatatcattgtacataagagttttcagagatttcatatatatcttttacagaggctattttaatctttagtgcatggttaacagaaaaaaattatacaattttgacaatattatttttcgtatcaggttgctgtttaattttggagggggtggggaaatagttctggtgccttaacgcatggctggaatttatagaggctacaaccacatttgttcacaggagtttttggtgcggggtgggaaggatggaaggccttggatttatattgcacttcatagacccctaggctgctgtgcggtgggactccacatgcgccggaaggagcttcaggtgagcactgctcatgtgtggatgcccctgcaacaggcttccctgtctgtagagccaggggtgcaagtgccatccacacttgcagtgaatggcttttccttttaggtttaagtcctgtctgtctgtaaggcgtagaatctgtccgtctgtaaggcgtagaatgagggttgttaatccatcacaagcaaaaggtcagaacagttaaacactgcctttcctcctcctcttattttatgataaaagcaaatgtggccttctcagtatcattcgattgctatttgagacttttaaattaaggtaaaggctgctggtgttggtacctgtggatttttctatactgatgttttcgttttgccaatataatgagtattacattggccttgggggacagaaaggaggaagttctgacttttcagggctaccttatttctactaaggacccagagcaggcctgtccatgccattccttcgcacagatgaaactgagctgggactggaaaggacagcccttgacctgggttctgggtataatttgcacttttgagactggtagctaaccatcttatgagtgccaatgtgtcatttagtaaaacttaaatagaaacaaggtccttcaaatgttcctttggccaaaagctgaagggagttactgagaaaatagttaacaattactgtcaggtgtcatcactgttcaaaaggtaagcacatttagaattttgttcttgacagttaactgactaatcttacttccacaaaatatgtgaatttgctgcttctgagaggcaatgtgaaagagggagtattacttttatgtacaaagttatttatttatagaaattttggtacagtgtacattgaaaaccatgtaaaatattgaagtgtctaacaaatggcattgaagtgtctttaataaaggttcatttataaatgtcaaaaaaaaaaaaaaaaaaaaaaaaaaaaaaaaaaaaaaaaaaaaaaaaaaa

SEQ ID NO: 57 - DNA, 9445 bp, Homo sapiens
gggataatgctcccggagaaggattctgcagcagttctcaaaggctagacttgagtggtattgctgcatatgcgctgattcttcagcttgtctctaaccgaggaagcattgattgggagctactcattcagaaaattaaaagaaagaagccagaaaatattatcaaccctttgagaacacgacacaacgaactttatattttaccacttccttgaatagttgcaggagaaataacaaggcattgaagaatggcagatgaacggaaagatgaagcaaaggcacctcactggacctcagcaccgctaacagaggcatctgcacactcacatccacctgagattaaggatcaaggcggagcaggggaaggacttgtccgaagcgccaatggattcccatacagggaggatgaagagggtgcctttggagagcatgggtcacagggcacctattcaaataccaaagagaatgggatcaacggagagctgacctcagctgacagagaaacagcagaggaggtgtctgcaaggatagttcaagtagtcactgctgaggctgtagcagtcctgaaaggtgaacaagagaaagaagctcaacataaagaccagactgcagctctgcctttagcagctgaagaaacagctaatctgcctccttctccacccccatcacctgcctcagaacagactgtcacagtggaggaagatttacttacagcctcgaagatggagttccacgatcaacaggaattgactccctctacagctgagccttcagaccagaaggaaaaggagtcagagaagcaaagtaagcctggtgaagaccttaaacatgctgccttagtttctcagccagagacaactaaaacttaccctgataaaaaggacatgcaaggcacggaagaagaaaaagcacccctagctttgtttgggcacactcttgttgccagcctggaagacatgaaacagaagacagaaccaagccttgtagtacctggcattgacctccctaaagagcctccaactccaaaagaacaaaaggactggttcatcgaaatgccaacggaagcaaaaaaggatgagtggggtttagttgcccccatatctcctggccctctgactcccatgagggaaaaagatgtatttgatgatatcccaaaatgggaagggaaacagtttgattctcccatgccaagtccctttcaagggggaagcttcactcttcctttagatgtcatgaagaatgaaatagttacagaaacatcgccctttgcccctgcctttttacagccagatgacaaaaaatctctgcaacaaaccagtggcccagctactgccaaagatagttttaaaattgaagagccccatgaggctaaacctgacaaaatggcagaagcaccaccctcagaggcaatgaccttacccaaagatgctcacattccagttgtagaagaacatgttatggggaaagttttagaggaagaaaaggaggccataaatcaagagactgtgcagcaaagggatactttcacccccagtggacaggaacctatacttactgaaaaggaaactgagctgaagcttgaagaaaaaaccaccatttctgacaaagaagctgtgccaaaagagagtaaacccccaaaacctgcagatgaagaaataggcataattcagacctccacagagcacactttctcagaacagaaagaccaagagcctaccacagatatgttgaaacaggactcgttccctgtaagtttggagcaagcagttacagattcagccatgacctctaaaacactggagaaagccatgaccgaaccatctgcattaattgaaaagagctcaattcaggaactttttgaaatgagagttgatgacaaagataagattgaaggagttggagctgcaacatcagctgagcttgatatgccattttatgaagataaatcaggaatgtccaagtactttgaaacatctgccttgaaagaagaagcaacaaaaagcattgagccaggcagtgattactatgaactgagtgacactagagaaagtgtccatgagtctattgataccatgtctcccatgcataaaaatggtgacaaggagtttcaaacaggaaaagaatcccagcccagtcctccagcacaagaagcagggtacagcactctcgcacagagttatccatcagatttacctgaagaacccagttctcctcaagaaagaatgttcactattgatccaaaagtgtatggagagaaaagggacctccacagtaagaataaggatgatttgacccttagcaggagtttaggacttggtggtaggtctgcaatagaacaaagaagcatgtcaatcaatttgccgatgtcttgcctagattccatagcccttggatttaactttggtcggggacatgatctttctcctctggcttccgatattctaaccaacactagtggaagtatggatgaaggggatgattaccttccagccaccacacctgcactggagaaagccccttgcttccctgtagaaagcaaagaggaagaacagatagagaaagtaaaagctactggagaagaaagtactcaagcggagatatcatgtgagtctcctttcctagccaaagatttttacaaaaatggtactgtcatggcacctgaccttcctgaaatgctagatctggcaggcacaaggtcaagattggcttctgtgagtgcagatgctgaggttgccaggaggaaatcagtcccatcagagactgtggttgaggatagtcgtactggcttgcccccggtaactgatgaaaaccatgtcattgtaaaaacggacagtcagctcgaagacctgggctactgtgtgttcaataagtacacagtcccattgccatcacctgttcaagacagtgagaatttatcaggggagagtggtaccttttacgaaggcactgatgataaagttcgaagagatttggccacagacctttcactgattgaagtgaaactggcagcagccggaagagtcaaagatgagttcagtgttgacaaagaagcatccgcgcatatctctggtgacaaatcaggactgagtaaggagtttgaccaagagaagaaagctaatgataggttggatactgtactagaaaagagtgaagaacatgctgattcaaaagaacatgccaagaaaactgaagaggctggtgatgaaatagaaacattcggattaggagtaacctatgagcaagctttggccaaagatttgtcaataccaacagatgcatcctctgagaaagcagagaagggtcttagttcagtgccagagatagctgaggtagaaccatccaaaaaggtggaacaaggtctggattttgctgtccagggtcaactagatgttaaaattagtgactttggacagatggcttcagggctaaacatagatgatagaagggcaacagagctaaaacttgaggctacacaggacatgaccccctcatccaaagcaccgcaggaggcagatgcatttatgggtgttgagtctggccacatgaaagaaggcactaaagttagtgagacagaagtcaaagagaaggtggccaagcctgacttggtgcaccaggaggctgtagacaaggaggagtcctatgaatctagtggtgagcatgaaagtctcaccatggagtccttgaaagctgatgagggcaagaaggaaacatctccagaatcatctctaattcaagatgagattgccgtcaaattgtcagtggaaataccttgcccacctgctgtttcagaggctgatttagccacagatgagagagctgatgtccagatggaatttattcaggggccaaaagaagaaagcaaagagaccccagatatatccatcacgccttctgatgttgcagagccattgcatgaaacgatcgtatctgaaccagcagagattcagagtgaggaagaagagatagaagcccagggagaatatgataaactgctcttccgctcagacacccttcagataactgacctgggtgtctcaggtgccagggaggaatttgtggagacctgcccaagtgaacacaaaggagtgattgagtctgttgtgaccatcgaggatgatttcatcactgtagtgcaaaccacaactgatgaaggggagtcagggtcccacagcgtgcgttttgcagccctagagcagcctgaggtggaaaggagaccatctcctcatgatgaagaagagtttgaagtagaagaggcagctgaagcccaggcagaacccaaagatggttccccagaggctccagcttcccctgagagagaagaggttgcactttctgaatataagacagaaacctatgacgattacaaagatgagaccaccattgacgactccatcatggacgctgacagcctctgggtggacactcaagatgatgataggagcatcatgacagaacagttagaaactattcctaaagaggagaaagctgaaaaggaagctcggagatcatctcttgagaaacatagaaaagaaaagccttttaaaaccgggagaggcagaatttccactcctgaaagaaaagtagctaaaaaggaacctagcacagtctccagagatgaagtgagaaggaaaaaagcagtttataagaaggctgaacttgctaaaaaaacagaagttcaggcccactctccctccaggaaattcattttaaaacctgctatcaaatatactagaccaactcatctctcctgtgttaagcggaaaaccacagcagcaggtggggaatcagctctggctcccagtgtatttaaacaggcaaaggacaaagtctctgacggagtaaccaagagcccagaaaagcgctcttctctcccaagaccttcctccattctccctcctcggcgaggtgtgtcaggagacagagatgagaattccttctctctcaacagttctatctcttcttcagcacggcggaccaccaggtcagagccaattcgcagagcagggaagagtggtacctcaacacccactacccctgggtctactgccatcactcctggcaccccaccaagttattcttcacgcacaccaggcactcctggaacccctagctatcccaggacccctcacacaccaggaacccccaagtctgccatcttggtgccgagtgagaagaaggtcgccatcatacgtactcctccaaaatctcctgcgactcccaagcagcttcggcttattaaccaaccactgccagacctgaagaatgtcaaatccaaaatcggatcaacagacaacatcaaataccagcctaaaggggggcaggtacaaattgttaccaagaaaatagacctaagccatgtgacatccaaatgtggctctctgaagaacatccgccacaggccaggtggcggacgtgtgaaaattgagagtgtaaaactagatttcaaagaaaaggcccaagctaaagttggttctcttgataatgctcatcatgtacctggaggtggtaatgtcaagattgacagccaaaagttgaacttcagagagcatgctaaagcccgtgtggaccatggggctgagatcattacacagtccccaggcagatccagcgtggcatcaccccgacgactcagcaatgtctcctcgtctggaagcatcaacctgctcgaatctcctcagcttgccactttggctgaggatgtcactgctgcactcgctaagcagggcttgtgaatatttctcatttagcattgaaataataatatttaggcatgagctcttggcaggagtgggctctgagcagttgttatattcattctttataaaccataaaataaataatctcatccccaaactgtagtaattgttacaattttctatttaaaaaatgaatagtacatgcagaaattgacctgatttccatttgcaacaggaagacactggctttacatgggttcaattggacaattatttttgctctgctctgttttgcatggagtattattattttaaaaattgcatttttacctttcatgtgcctgaaggctatccactacattctgaaggccttgttaaaatccaagctgctcatttcactattctgtttctgagtgagaagataaaaactgcccattgtaacttatttcaggttaaattaaaccaaggagtctgattgcaggaagggaagagcatgtaagaaataagtttttttaaagtgttattttgtataaatgggaagaaagattcaattaagttattaacatttgggacctggataattatatcagagtatgtcagtccaataaattatttaactaattaaaaaatagttgcaaagcatttgagctgtggttgaggaagtggtgtaaaagtgcatccattaggaatgatgcactttcattaggatggactcgtgtctgattagaatgtcagttgatcagctagatttgtgtccacactaccagtttcacaccccctttccatctgtttgatacagtattatagatataaatatatatatatttctctgtggccatttgtgatacttcctcatatacttgaatattatacttctttattcacagtatctgtgtctcctgcaccctttggtgttgcaattttagatatgtgaaagtagatgttagcagggttctctccctatttaaaaaaaatacattaaaaaagacaaaaaattttagcatgaagttgctttctgtaacaactcaaagccgtaaccctgttttagtgccagatacaagtctctcccgtgatgctagacaaaaaattatttttctttgctttcaccaacatggagtttgtgggggtgggtccagttatacatgaaagggtttacagattgttggtttaagattatggatttatctcatttttaatcacaggatagtttggggtttattcctattattattcatgaaaccgacttaagattttttctttatttttctttttttttccatttgctaaagttgaaagttgaaactaactataatagtttgaaacatgttttctcatttttccaaatagtatctgtttattaaattctctaatagaagatgtttgtctttcttacccaaagtaaagatcccctgatcagaaagaaaaaatacaatactttgggaagctatagctataaaacacttgagacacagatatctaaatcagtttttttccaagactccaacattgcactctgtaaagtaacacactgtgatctagtattatttatcagtagataatactgttctgactgtatatacagtctagaactcacaaatcaattagttcctctcacaaatcattcatcttagacttacaaataaggaatgaaatagtcaatggcctgattaaggcaaagagctaccaggctagatggacactttttaaaaattttatctgttctttttcttgctcagggctggtaggttggatctgaaccattaaaatcaaatggtccactaggcgtatgatctctttgagccaaatcagttcctgaatataaaggaggaaatgatgaggatgtactgaggcaacggggaagtatagaaacatccaagacaaaagccaagggatgcaaaggcagagacacaggtgctttttggtgacccagtggatatggcaaccagtgtaactgccatacaagaaaccctaggagcaaacccacaccactcattctcagctaagagattttacacaggcaaacgtgtcttaaaccatctataaatcagttattttatatgacagtcaaaaccttagaaaccttaggatcattatatctattttctgcctattaattgctgtgaggtttgatttgaccaatctgggcaatttattcatcagcttcccttgaagtgcaccagaaaatagaagaaaggtgtgtggagacttagggtattttattacatgttttcatagtcttaaatagtgattaaatttctctagaaagaagttaacagctcattagaaaagttttaacctgtgaaataagtatttttctcaacattctttaaagtttttatataagttaacactaggtaaacattctgcatactagaagtcagtttattacaaatacatgtcaaaaataaagattatacaaggcaccaaactactagatttggcattaaaacaaatgtttatttctaatcacaacaaaattataatgaataaatgttcttgctttgtatggaaatacaattctttattaaagttaacagaaaggaactgatcgtttgtaccagtaaaagagagaaacacacaggttaaatatcttcttgtggggttaaggggtagaacctatcttgccttcactctcaagataacgactcaaattaagctttttgagcaccactcttgtggggacacacatacgctgatctaggaatgaaatcttcgtggtctcaattctagatctactatgccagtttctctctggctttagcctttgagaacctgtataagaatacgtaagtaatccagagctgtgaagagtttaaaggccaacttctccagtgaactcaacctctgggtcacttgcaaccagaaattggatacctcataatgatgcaggaaagacccgagttcatgatgagtttcaaaggccacgttcatttaggaaccaactctctctggatttacctgctgagttccagcagcgtgatgggctgacatcccacctacaagtatgacacctgtgtaacaccagctaggtacggctggagaaggctgaagagagaatgccattaaatggaagaatgtactgattgtagtgaccttctccacacacacacacacacacacacacacacacacctacagtaatacagcaagcgtggaataatcagccaatatataacattccatcagtattttattaaggaaataacctgaatgtggttgattttgacatagctgcaattacagttttcttctatttttcaagccacaataaggaaaataaactactcatggtctaaatactagagataaagtagattcatggcttggtaaggaaattttaagcattccttcaaagattgacgtgctaaaataagcattgatgttttgagtttttttacacctaggatttttagcttgggtgtgtaggtgaaggccaagactctctgcaggaaaaagcttattttcaaactcagaaaataaaatgtcaatcataaaaatctacttcaactttagcaaaaagaaaaaaaaatcaacaaaaagtatactctgtatgctgggattccgaggttccaacacactgttacaaatctgtggggggtttctttcttctgataattctagagcctgttaccatagaaaggcatttcttcaatggctggttgtagttagttcatgtttttcaatcaaatttgcaaatgtatttgttgctgtatagtgattgttttgcaaaataaaattgcttgtcacct

SEQ ID NO: 58 - DNA, 6762 bp, Homo sapiens
ggacggccgagcggcagggcgctcgcgcgcgcccactagtggccggaggagaaggctcccgcggaggccgcgctgcccgccccctcccctggggaggctcgcgttcccgctgctcgcgcctgcgccgcccgccggcctcaggaacgcgccctcttcgccggcgcgcgccctcgcagtcaccgccacccaccagctccggcaccaacagcagcgccgctgccaccgcccaccttctgccgccgccaccacagccaccttctcctcctccgctgtcctctcccgtcctcgcctctgtcgactatcaggtgaactttgaaccaggatggctgagccccgccaggagttcgaagtgatggaagatcacgctgggacgtacgggttgggggacaggaaagatcaggggggctacaccatgcaccaagaccaagagggtgacacggacgctggcctgaaagaatctcccctgcagacccccactgaggacggatctgaggaaccgggctctgaaacctctgatgctaagagcactccaacagcggaagatgtgacagcacccttagtggatgagggagctcccggcaagcaggctgccgcgcagccccacacggagatcccagaaggaaccacagctgaagaagcaggcattggagacacccccagcctggaagacgaagctgctggtcacgtgacccaagagcctgaaagtggtaaggtggtccaggaaggcttcctccgagagccaggccccccaggtctgagccaccagctcatgtccggcatgcctggggctcccctcctgcctgagggccccagagaggccacacgccaaccttcggggacaggacctgaggacacagagggcggccgccacgcccctgagctgctcaagcaccagcttctaggagacctgcaccaggaggggccgccgctgaagggggcagggggcaaagagaggccggggagcaaggaggaggtggatgaagaccgcgacgtcgatgagtcctccccccaagactcccctccctccaaggcctccccagcccaagatgggcggcctccccagacagccgccagagaagccaccagcatcccaggcttcccagcggagggtgccatccccctccctgtggatttcctctccaaagtttccacagagatcccagcctcagagcccgacgggcccagtgtagggcgggccaaagggcaggatgcccccctggagttcacgtttcacgtggaaatcacacccaacgtgcagaaggagcaggcgcactcggaggagcatttgggaagggctgcatttccaggggcccctggagaggggccagaggcccggggcccctctttgggagaggacacaaaagaggctgaccttccagagccctctgaaaagcagcctgctgctgctccgcgggggaagcccgtcagccgggtccctcaactcaaagctcgcatggtcagtaaaagcaaagacgggactggaagcgatgacaaaaaagccaagacatccacacgttcctctgctaaaaccttgaaaaataggccttgccttagccccaaacaccccactcctggtagctcagaccctctgatccaaccctccagccctgctgtgtgcccagagccaccttcctctcctaaatacgtctcttctgtcacttcccgaactggcagttctggagcaaaggagatgaaactcaagggggctgatggtaaaacgaagatcgccacaccgcggggagcagcccctccaggccagaagggccaggccaacgccaccaggattccagcaaaaaccccgcccgctccaaagacaccacccagctctggtgaacctccaaaatcaggggatcgcagcggctacagcagccccggctccccaggcactcccggcagccgctcccgcaccccgtcccttccaaccccacccacccgggagcccaagaaggtggcagtggtccgtactccacccaagtcgccgtcttccgccaagagccgcctgcagacagcccccgtgcccatgccagacctgaagaatgtcaagtccaagatcggctccactgagaacctgaagcaccagccgggaggcgggaaggtgcagataattaataagaagctggatcttagcaacgtccagtccaagtgtggctcaaaggataatatcaaacacgtcccgggaggcggcagtgtgcaaatagtctacaaaccagttgacctgagcaaggtgacctccaagtgtggctcattaggcaacatccatcataaaccaggaggtggccaggtggaagtaaaatctgagaagcttgacttcaaggacagagtccagtcgaagattgggtccctggacaatatcacccacgtccctggcggaggaaataaaaagattgaaacccacaagctgaccttccgcgagaacgccaaagccaagacagaccacggggcggagatcgtgtacaagtcgccagtggtgtctggggacacgtctccacggcatctcagcaatgtctcctccaccggcagcatcgacatggtagactcgccccagctcgccacgctagctgacgaggtgtctgcctccctggccaagcagggtttgtgatcaggcccctggggcggtcaataattgtggagaggagagaatgagagagtgtggaaaaaaaaagaataatgacccggcccccgccctctgcccccagctgctcctcgcagttcggttaattggttaatcacttaacctgcttttgtcactcggctttggctcgggacttcaaaatcagtgatgggagtaagagcaaatttcatctttccaaattgatgggtgggctagtaataaaatatttaaaaaaaaacattcaaaaacatggccacatccaacatttcctcaggcaattccttttgattcttttttcttccccctccatgtagaagagggagaaggagaggctctgaaagctgcttctgggggatttcaagggactgggggtgccaaccacctctggccctgttgtgggggtgtcacagaggcagtggcagcaacaaaggatttgaaacttggtgtgttcgtggagccacaggcagacgatgtcaaccttgtgtgagtgtgacgggggttggggtggggcgggaggccacgggggaggccgaggcaggggctgggcagaggggagaggaagcacaagaagtgggagtgggagaggaagccacgtgctggagagtagacatccccctccttgccgctgggagagccaaggcctatgccacctgcagcgtctgagcggccgcctgtccttggtggccgggggtgggggcctgctgtgggtcagtgtgccaccctctgcagggcagcctgtgggagaagggacagcgggtaaaaagagaaggcaagctggcaggagggtggcacttcgtggatgacctccttagaaaagactgaccttgatgtcttgagagcgctggcctcttcctccctccctgcagggtagggggcctgagttgaggggcttccctctgctccacagaaaccctgttttattgagttctgaaggttggaactgctgccatgattttggccactttgcagacctgggactttagggctaaccagttctctttgtaaggacttgtgcctcttgggagacgtccacccgtttccaagcctgggccactggcatctctggagtgtgtgggggtctgggaggcaggtcccgagccccctgtccttcccacggccactgcagtcaccccgtctgcgccgctgtgctgttgtctgccgtgagagcccaatcactgcctatacccctcatcacacgtcacaatgtcccgaattcccagcctcaccaccccttctcagtaatgaccctggttggttgcaggaggtacctactccatactgagggtgaaattaagggaaggcaaagtccaggcacaagagtgggaccccagcctctcactctcagttccactcatccaactgggaccctcaccacgaatctcatgatctgattcggttccctgtctcctcctcccgtcacagatgtgagccagggcactgctcagctgtgaccctaggtgtttctgccttgttgacatggagagagccctttcccctgagaaggcctggccccttcctgtgctgagcccacagcagcaggctgggtgtcttggttgtcagtggtggcaccaggatggaagggcaaggcacccagggcaggcccacagtcccgctgtcccccacttgcaccctagcttgtagctgccaacctcccagacagcccagcccgctgctcagctccacatgcatagtatcagccctccacacccgacaaaggggaacacacccccttggaaatggttcttttcccccagtcccagctggaagccatgctgtctgttctgctggagcagctgaacatatacatagatgttgccctgccctccccatctgcaccctgttgagttgtagttggatttgtctgtttatgcttggattcaccagagtgactatgatagtgaaaagaaaaaaaaaaaaaaaaaaggacgcatgtatcttgaaatgcttgtaaagaggtttctaacccaccctcacgaggtgtctctcacccccacactgggactcgtgtggcctgtgtggtgccaccctgctggggcctcccaagttttgaaaggctttcctcagcacctgggacccaacagagaccagcttctagcagctaaggaggccgttcagctgtgacgaaggcctgaagcacaggattaggactgaagcgatgatgtccccttccctacttccccttggggctccctgtgtcagggcacagactaggtcttgtggctggtctggcttgcggcgcgaggatggttctctctggtcatagcccgaagtctcatggcagtcccaaaggaggcttacaactcctgcatcacaagaaaaaggaagccactgccagctggggggatctgcagctcccagaagctccgtgagcctcagccacccctcagactgggttcctctccaagctcgccctctggaggggcagcgcagcctcccaccaagggccctgcgaccacagcagggattgggatgaattgcctgtcctggatctgctctagaggcccaagctgcctgcctgaggaaggatgacttgacaagtcaggagacactgttcccaaagccttgaccagagcacctcagcccgctgaccttgcacaaactccatctgctgccatgagaaaagggaagccgcctttgcaaaacattgctgcctaaagaaactcagcagcctcaggcccaattctgccacttctggtttgggtacagttaaaggcaaccctgagggacttggcagtagaaatccagggcctcccctggggctggcagcttcgtgtgcagctagagctttacctgaaaggaagtctctgggcccagaactctccaccaagagcctccctgccgttcgctgagtcccagcaattctcctaagttgaagggatctgagaaggagaaggaaatgtggggtagatttggtggtggttagagatatgcccccctcattactgccaacagtttcggctgcatttcttcacgcacctcggttcctcttcctgaagttcttgtgccctgctcttcagcaccatgggccttcttatacggaaggctctgggatctcccccttgtggggcaggctcttggggccagcctaagatcatggtttagggtgatcagtgctggcagataaattgaaaaggcacgctggcttgtgatcttaaatgaggacaatccccccagggctgggcactcctcccctcccctcacttctcccacctgcagagccagtgtccttgggtgggctagataggatatactgtatgccggctccttcaagctgctgactcactttatcaatagttccatttaaattgacttcagtggtgagactgtatcctgtttgctattgcttgttgtgctatggggggaggggggaggaatgtgtaagatagttaacatgggcaaagggagatcttggggtgcagcacttaaactgcctcgtaacccttttcatgatttcaaccacatttgctagagggagggagcagccacggagttagaggcccttggggtttctcttttccactgacaggctttcccaggcagctggctagttcattccctccccagccaggtgcaggcgtaggaatatggacatctggttgctttggcctgctgccctctttcaggggtcctaagcccacaatcatgcctccctaagaccttggcatccttccctctaagccgttggcacctctgtgccacctctcacactggctccagacacacagcctgtgcttttggagctgagatcactcgcttcaccctcctcatctttgttctccaagtaaagccacgaggtcggggcgagggcagaggtgatcacctgcgtgtcccatctacagacctgcagcttcataaaacttctgatttctcttcagctttgaaaagggttaccctgggcactggcctagagcctcacctcctaatagacttagccccatgagtttgccatgttgagcaggactatttctggcacttgcaagtcccatgatttcttcggtaattctgagggtggggggagggacatgaaatcatcttagcttagctttctgtctgtgaatgtctatatagtgtattgtgtgttttaacaaatgatttacactgactgttgctgtaaaagtgaatttggaaataaagttattactctgattaaa

SEQ ID NO: 59 - DNA, 4790 bp, Homo sapiens
ggggaagcgcagtgcgcaggcgcaactgcctggctctgctcgctccggcgctccggcccagctctcgcggacaagtccagacatcgcgcgcccccccttctccgggtccgccccctcccccttctcggcgtcgtcgaagataaacaatagttggccggcgagcgcctagtgtgtctcccgccgccggattcggcgggctgcgtgggaccggcgggatcccggccagccggccatggcggggctgtactcgctgggagtgagcgtcttctccgaccagggcgggaggaagtacatggaggacgttactcaaatcgttgtggagcccgaaccgacggctgaagaaaagccctcgccgcggcggtcgctgtctcagccgttgcctccgcggccgtcgccggccgcccttcccggcggcgaagtctcggggaaaggcccagcggtggcagcccgagaggctcgcgaccctctcccggacgccggggcctcgccggcacctagccgctgctgccgccgccgttcctccgtggcctttttcgccgtgtgcgacgggcacggcgggcgggaggcggcacagtttgcccgggagcacttgtggggtttcatcaagaagcagaagggtttcacctcgtccgagccggctaaggtttgcgctgccatccgcaaaggctttctcgcttgtcaccttgccatgtggaagaaactggcggaatggccaaagactatgacgggtcttcctagcacatcagggacaactgccagtgtggtcatcattcggggcatgaagatgtatgtagctcacgtaggtgactcaggggtggttcttggaattcaggatgacccgaaggatgactttgtcagagctgtggaggtgacacaggaccataagccagaacttcccaaggaaagagaacgaatcgaaggacttggtgggagtgtaatgaacaagtctggggtgaatcgtgtagtttggaaacgacctcgactcactcacaatggacctgttagaaggagcacagttattgaccagattccttttctggcagtagcaagagcacttggtgatttgtggagctatgatttcttcagtggtgaatttgtggtgtcacctgaaccagacacaagtgtccacactcttgaccctcagaagcacaagtatattatattggggagtgatggactttggaatatgattccaccacaagatgccatctcaatgtgccaggaccaagaggagaaaaaatacctgatgggtgagcatggacaatcttgtgccaaaatgcttgtgaatcgagcattgggccgctggaggcagcgtatgctccgagcagataacactagtgccatagtaatctgcatctctccagaagtggacaatcagggaaactttaccaatgaagatgagttatacctgaacctgactgacagcccttcctataatagtcaagaaacctgtgtgatgactccttccccatgttctacaccaccagtcaagtcactggaggaggatccatggccaagggtgaattctaaggaccatatacctgccctggttcgtagcaatgccttctcagagaattttttagaggtttcagctgagatagctcgagagaatgtccaaggtgtagtcataccctcaaaagatccagaaccacttgaagaaaattgcgctaaagccctgactttaaggatacatgattctttgaataatagccttccaattggccttgtgcctactaattcaacaaacactgtcatggaccaaaaaaatttgaagatgtcaactcctggccaaatgaaagcccaagaaattgaaagaacccctccaacaaactttaaaaggacattagaagagtccaattctggccccctgatgaagaagcatagacgaaatggcttaagtcgaagtagtggtgctcagcctgcaagtctccccacaacctcacagcgaaagaactctgttaaactcaccatgcgacgcagacttaggggccagaagaaaattggaaatcctttacttcatcaacacaggaaaactgtttgtgtttgctgaaatgcatctgggaaatgaggtttttccaaacttaggatataagagggctttttaaatttggtgccgatgttgaactttttttaaggggagaaaattaaaagaaatatacagtttgactttttggaattcagcagttttatcctggccttgtacttgcttgtattgtaaatgtggattttgtagatgttagggtataagttgctgtaaaatttgtgtaaatttgtatccacacaaattcagtctctgaatacacagtattcagagtctctgatacacagtaattgtgacaatagggctaaatgtttaaagaaatcaaaagaatctattagattttagaaaaacatttaaactttttaaaatacttattaaaaaatttgtataagccacttgtcttgaaaactgtgcaactttttaaagtaaattattaagcagactggaaaagtgatgtattttcatagtgacctgtgtttcacttaatgtttcttagagccaagtgtcttttaaacattattttttatttctgatttcataattcagaactaaatttttcatagaagtgttgagccatgctacagttagtcttgtcccaattaaaatactatgcagtatctcttacatcagtagcatttttctaaaaccttagtcatcagatatgcttactaaatcttcagcatagaaggaagtgtgtttgcctaaaacaatctaaaacaattcccttctttttcatcccagaccaatggcattattaggtcttaaagtagttactcccttctcgtgtttgcttaaaatatgtgaagttttccttgctatttcaataacagatggtgctgctaattcccaacatttcttaaattattttatatcatacagttttcattgattatatgggtatatattcatctaataaatcagtgaactgttcctcatgttgctgaatttgtagttgttggtttattttaatggtatgtacaagttgagtatcccttatccaaaatgcttgggaccagaagtgtttcagattttttaaaattttggaatatttgctttatactgagcttttgagtgttcccaatctgaaattcaaaatgctctaatgagcatttcctttgagcatcatgcctgctctgaaaaagtttctgattctggagcattttggattttggattttcagattagggatgcttaacctggattaacattctgttgtgccatgatcatgctttacagtgagtgtattttatttatttattattttgtttgtttgtttgagatggagtctcactctgtcatccaggctagagtgcagtggcgtgatctcggctgactgcaacctctgcctcccgggttcaagtgattctcctgcctcaatctctctccccagaagctgggattacaggtgtgtgccaccacacccggctaatttttttttttttttttgagatggagtctagctctgtcatccaggctggagtgcagtggtgtgatctcggctccctgcaacctctgccttctgggttcctgcgattctcctgcctcagcctcctgagtagctgagattacaggcacgcgccactgtgcccagccaatttttgtatttttagtagagatggggtttcacatgtcagtcatgctggtcttgatctcctgacctcgtgatccacccgcctcgacctcccaaagtactgggattacaggcgtgagccaccgcatccggcctgagttttatgctttcaatgtatttcttacatttcagttcaagtgattttcatgtctcagcctcctgagtagctggaactacaggtgcgtgccaccatgcctggctaagttttgtatttttagtagagatgggttttcatcatgttggccaagatggtcttgatctcttgacctcatgatccaccagcctaggcctcccaaagtgctgggattacaggtgtgagccaccgtgcccagccaactatgccattatttaaccatgtccacacattctggttattttcaatattttgcagaagataattcttgatcggtgtgtcttatgccacaaggattaaaatatgtattcattgctacaaaacaatatctcgaaatttagcagtttaaaacaacaaatattatctccagtttctgagcctcagaaatctgagagtggtttagctgggtgatagtctcgtggttttggtcaagctaccaaccagggctacaatctttcgaaggtgtcattggggctagaagatctgcttcccgcaagactcacagctgttggcaggagacctcagtttgttgccacatgttcccctccagagggcctctcacaacatggcagttatttgtccccagagcaagcaacaccggagggcaaggaagaagccatgatgttttttgtaacctagcctctgaaagtgtcataccaattctgtattttgttggtcacacagaccaagtcaactacaacgtgggagactcctacacaaggcatgaattctaggaggtgggcatttttaagtgtcatctggaaggaggctgtcacaacctggaagttaaaagcattgatattctgaaatacagcgtgtataacattgttttagtagggtgtgcaatagttatgttttggtaatagcattaatgaacaatgttattttcatcttccagacatctggaagattgctctagtggagtaaaacatcttaatgtattttgtccctaaataaactatctcactaacaaaaaaaaaaaaaaa

SEQ ID NO: 60 - DNA, 4507 bp, Homo sapiens
gaccaattgtcatacgacttgcagtgagcgtcaggagcacgtccaggaactcctcagcagcgcctccttcagctccacagccagacgccctcagacagcaaagcctacccccgcgccgcgccctgcccgccgctgcgatgctcgcccgcgccctgctgctgtgcgcggtcctggcgctcagccatacagcaaatccttgctgttcccacccatgtcaaaaccgaggtgtatgtatgagtgtgggatttgaccagtataagtgcgattgtacccggacaggattctatggagaaaactgctcaacaccggaatttttgacaagaataaaattatttctgaaacccactccaaacacagtgcactacatacttacccacttcaagggattttggaacgttgtgaataacattcccttccttcgaaatgcaattatgagttatgtgttgacatccagatcacatttgattgacagtccaccaacttacaatgctgactatggctacaaaagctgggaagccttctctaacctctcctattatactagagcccttcctcctgtgcctgatgattgcccgactcccttgggtgtcaaaggtaaaaagcagcttcctgattcaaatgagattgtggaaaaattgcttctaagaagaaagttcatccctgatccccagggctcaaacatgatgtttgcattctttgcccagcacttcacgcatcagtttttcaagacagatcataagcgagggccagctttcaccaacgggctgggccatggggtggacttaaatcatatttacggtgaaactctggctagacagcgtaaactgcgccttttcaaggatggaaaaatgaaatatcagataattgatggagagatgtatcctcccacagtcaaagatactcaggcagagatgatctaccctcctcaagtccctgagcatctacggtttgctgtggggcaggaggtctttggtctggtgcctggtctgatgatgtatgccacaatctggctgcgggaacacaacagagtatgcgatgtgcttaaacaggagcatcctgaatggggtgatgagcagttgttccagacaagcaggctaatactgataggagagactattaagattgtgattgaagattatgtgcaacacttgagtggctatcacttcaaactgaaatttgacccagaactacttttcaacaaacaattccagtaccaaaatcgtattgctgctgaatttaacaccctctatcactggcatccccttctgcctgacacctttcaaattcatgaccagaaatacaactatcaacagtttatctacaacaactctatattgctggaacatggaattacccagtttgttgaatcattcaccaggcaaattgctggcagggttgctggtggtaggaatgttccacccgcagtacagaaagtatcacaggcttccattgaccagagcaggcagatgaaataccagtcttttaatgagtaccgcaaacgctttatgctgaagccctatgaatcatttgaagaacttacaggagaaaaggaaatgtctgcagagttggaagcactctatggtgacatcgatgctgtggagctgtatcctgcccttctggtagaaaagcctcggccagatgccatctttggtgaaaccatggtagaagttggagcaccattctccttgaaaggacttatgggtaatgttatatgttctcctgcctactggaagccaagcacttttggtggagaagtgggttttcaaatcatcaacactgcctcaattcagtctctcatctgcaataacgtgaagggctgtccctttacttcattcagtgttccagatccagagctcattaaaacagtcaccatcaatgcaagttcttcccgctccggactagatgatatcaatcccacagtactactaaaagaacgttcgactgaactgtagaagtctaatgatcatatttatttatttatatgaaccatgtctattaatttaattatttaataatatttatattaaactccttatgttacttaacatcttctgtaacagaagtcagtactcctgttgcggagaaaggagtcatacttgtgaagacttttatgtcactactctaaagattttgctgttgctgttaagtttggaaaacagtttttattctgttttataaaccagagagaaatgagttttgacgtctttttacttgaatttcaacttatattataagaacgaaagtaaagatgtttgaatacttaaacactgtcacaagatggcaaaatgctgaaagtttttacactgtcgatgtttccaatgcatcttccatgatgcattagaagtaactaatgtttgaaattttaaagtacttttggttatttttctgtcatcaaacaaaaacaggtatcagtgcattattaaatgaatatttaaattagacattaccagtaatttcatgtctactttttaaaatcagcaatgaaacaataatttgaaatttctaaattcatagggtagaatcacctgtaaaagcttgtttgatttcttaaagttattaaacttgtacatataccaaaaagaagctgtcttggatttaaatctgtaaaatcagtagaaattttactacaattgcttgttaaaatattttataagtgatgttcctttttcaccaagagtataaacctttttagtgtgactgttaaaacttccttttaaatcaaaatgccaaatttattaaggtggtggagccactgcagtgttatcttaaaataagaatattttgttgagatattccagaatttgtttatatggctggtaacatgtaaaatctatatcagcaaaagggtctacctttaaaataagcaataacaaagaagaaaaccaaattattgttcaaatttaggtttaaacttttgaagcaaacttttttttatccttgtgcactgcaggcctggtactcagattttgctatgaggttaatgaagtaccaagctgtgcttgaataatgatatgttttctcagattttctgttgtacagtttaatttagcagtccatatcacattgcaaaagtagcaatgacctcataaaatacctcttcaaaatgcttaaattcatttcacacattaattttatctcagtcttgaagccaattcagtaggtgcattggaatcaagcctggctacctgcatgctgttccttttcttttcttcttttagccattttgctaagagacacagtcttctcatcacttcgtttctcctattttgttttactagttttaagatcagagttcactttctttggactctgcctatattttcttacctgaacttttgcaagttttcaggtaaacctcagctcaggactgctatttagctcctcttaagaagattaaaagagaaaaaaaaaggcccttttaaaaatagtatacacttattttaagtgaaaagcagagaattttatttatagctaattttagctatctgtaaccaagatggatgcaaagaggctagtgcctcagagagaactgtacggggtttgtgactggaaaaagttacgttcccattctaattaatgccctttcttatttaaaaacaaaaccaaatgatatctaagtagttctcagcaataataataatgacgataatacttcttttccacatctcattgtcactgacatttaatggtactgtatattacttaatttattgaagattattatttatgtcttattaggacactatggttataaactgtgtttaagcctacaatcattgatttttttttgttatgtcacaatcagtatatcttctttggggttacctctctgaatattatgtaaacaatccaaagaaatgattgtattaagatttgtgaataaatttttagaaatctgattggcatattgagatatttaaggttgaatgtttgtccttaggataggcctatgtgctagcccacaaagaatattgtctcattagcctgaatgtgccataagactgaccttttaaaatgttttgagggatctgtggatgcttcgttaatttgttcagccacaatttattgagaaaatattctgtgtcaagcactgtgggttttaatatttttaaatcaaacgctgattacagataatagtatttatataaataattgaaaaaaattttcttttgggaagagggagaaaatgaaataaatatcattaaagataactcaggagaatcttctttacaattttacgtttagaatgtttaaggttaagaaagaaatagtcaatatgcttgtataaaacactgttcactgttttttttaaaaaaaaaacttgatttgttattaacattgatctgctgacaaaacctgggaatttgggttgtgtatgcgaatgtttcagtgcctcagacaaatgtgtatttaacttatgtaaaagataagtctggaaataaatgtctgtttatttttgtactatttaaaaattgacagatcttttctgaagaaaaaaaaaaaaaaa

SEQ ID NO: 61 - DNA, 5421 bp, Homo sapiens
gcgcactgcttatttcccgctgtcaggatgaggaggcggaggtcggcggtcgggtccgtctctgcccgcggctgtggcggcgccggcggatccagccttagcggtttctctctgggcggcggcggcggcggctcggttgacgcctcctccgccagctgagcccgcgggagcccaggacgccgcttccccgcccatccccgctccccgaggccggccgcctggtcatggcgcagccgggcccggcttcccagcctgacgtttctcttcagcaacgggtagcagaattggaaaaaattaatgcagaatttttacgtgcacaacagcagcttgaacaagaatttaatcaaaagagagcaaaatttaaggagttatatttggctaaagaggaggatctgaagaggcaaaatgcagtattacaagctgcacaagatgatttgggacaccttcgaacccagctgtgggaagctcaagcagagatggagaatattaaggcgattgccacagtctctgagaacaccaagcaagaagctatagatgaagtgaaaagacagtggagagaagaagttgcttcacttcaggctgttatgaaagaaacagttcgtgactatgagcaccagttccaccttaggctggagcaggagcgaacacagtgggcacagtatagagaatccgcagagagggaaatagctgatttaagaagaaggctgtctgaaggtcaagaggaggaaaatttagaaaatgaaatgaaaaaggcccaagaggatgctgagaaacttcggtccgttgtgatgccaatggaaaaggaaattgcagctttgaaggataaactgacagaggctgaagacaaaattaaagagctggaggcctcaaaggttaaagaactgaatcattatctggaagctgagaaatcttgtaggactgatctagagatgtatgtagctgttttgaatactcagaaatctgttctacaggaagatgctgagaaactgcggaaagaattgcatgaagtttgccatctcttggagcaagagcgacaacaacacaaccagttaaaacatacgtggcagaaggccaatgaccagtttctggaatctcagcgtttactgatgagagacatgcagcgaatggagattgtgctaacttcagaacagctccgacaagttgaagaactgaagaagaaagatcaggaggatgatgaacaacaaagactcaataagagaaaggatcacaaaaaagcagatgttgaggaagaaataaaaataccagtagtgtgtgctttaactcaagaagaatcttcagcccagttatcaaatgaagaggagcatttagacagcacccgtggctcagttcattccttagatgcaggcttgctgttgccatctggagatcctttcagtaaatcggacaatgacatgtttaaagatggactcaggagagcacagtctacagacagcttgggaacctcgggctcattgcaatccaaagctttaggctataactacaaagcaaaatctgctggaaacctggacgagtcagattttggaccactggtaggagcagattcagtgtctgagaactttgatactgcatcccttgggtcactccagatgccaagtgggtttatgttaaccaaagatcaggaaagagcaatcaaggcgatgacaccagaacaagaagagacagcgtccctcctctccagcgttacccagggcatggagagtgcctatgtgtcccctagtggttatcgtttagttagtgaaacagaatggaatctcttgcagaaagaggtacataatgctggaaataaacttggtagacgttgtgatatgtgttccaattacgaaaaacagttacaaggaattcagattcaggaggctgaaacgagagaccaggtgaaaaaactacagctgatgctaaggcaagctaatgaccagttagagaagacaatgaaagataagcaggagctggaagacttcataaagcaaagcagcgaagattcgagtcaccagatctctgcactcgtcctaagagcccaggcctccgagatcttacttgaagagttacagcaggggctttcccaggcaaagagggatgttcaggaacagatggcggtgctgatgcagtcacgggaacaggtttcagaagagctggtgaggttacagaaagataatgacagtctccagggaaagcacagcctgcatgtgtcattacagcaagcagaagacttcatcctcccagacactacagaggcactgcgggagttggtattaaaataccgtgaggacatcattaatgtgcggacagcagcagaccacgtagaagaaaagctgaaggctgagatacttttcctaaaagagcagatccaagcagaacagtgtttaaaagaaaatcttgaagaaactctgcaactagaaatagaaaactgcaaggaggaaatagcttctatttctagcctaaaagctgaattagaaagaataaaagtggaaaaaggacagttggagtccacattaagagagaagtctcaacagcttgagagtcttcaggaaataaagatcagtttggaagagcagttaaagaaagagactgctgctaaggctaccgttgaacaactaatgtttgaagagaagaataaagctcagagattacagacagaattagatgtcagtgagcaagtccagagggattttgtaaagctttcacagacccttcaggtgcagttagagcggatccggcaagctgactccttggagagaatccgggcaattctgaatgatactaaactgacagacattaaccagcttcctgagacatgacaccctcatggcaggattctagcctgcactttgggtttttaactcatctttagagcaacagtaattattatttaactcttaactgaagaaagagaagtcacaacaaaaggaagactggagaaatgcttacttctagagggagaagactgtgcggcacaggaaacagcaaacagtggggtgatctgcagcccagagaccttcaaatgcgaacactataaactccaggcttgattccaacaggcgtgggatcagatttggtgatggaaaaagcgctgtttccttgcctgctttctccaagacagattttcggaacacatttccctaccctaaagcgacatcccagtagtgtttggaattttctgttcatagatattggaagagagaatttgctttatctgttgtctagagctcatcagtaacagtattcagttagcagacagaagtgtagtatgctgtatgaatattttatattaaaatatgaaggtttgagagcaggccattggctactgactgtattttgttttccttttaccattttatcttatcttgctttggaggaccttaaatgctactgaaacttacctgagaaccataggactgtggcaaacaaaaccaattcatgaagtgaattaatgatgaggatctgaaaacttggctggggctatatatactggaagttgaaggttaaaggaaaagcacaagaaactttggaagcactttttctgcatacttagatgatcttcatgggcccacagggtaccaggataaagccgaactggtaccatctactcttttgaagtgttttagtctagttattggatcagtgaaaaacattagtatacgtttttaaataggctaatttttcaacttggatcattaggcttacgtactacttgtttcaaatgtgtcaaatacaaaaatggtaactaggttgacagatactttgtatttttcttttgaattcagacctggaatgtaagtaagtgacaatgcttatggaaagccagttagttagaattggaaatctgtcttgtcattttacaagcattagattcctttcctgtgtgaagaaagcctcagtgaaacaggtctttgccataactttatgaagtgctacagaaagcacaaagaattgattcatgttcatcaatacctgctgagagtactgtcccaggaatatccagtggatggattcatcatccaggaggttcaaaagtaagatggttttcaaatcatttttgagactggttgcataacagcagggtacctgaaagagccttctgggagttagtgaactaggtagattgttttgttcacataacgccaccatcaacttaaagtgaattgtctttgttataaatgaggtcactatggacttaccctaaagatcttctgtacttctctcttccataggacaaatgataagtactacatacctcatctcttgggttattattgtagtcttgcattcatggttatgaatttaaaaataaataccaattatggaaatagtactaaaggcttgccgcacatgaaacattattttaattggtttaaagtccctttataaagagtgctacatggtttagataaaggaaacatataactattgagttacaggggattttattaattataaaatgcaatcaatttaaattacgtaggtttaagactagtcccttggataagccccaagcgaatttgtcttcagattattaaaattagtgctgtaaatcagggtgggcaattcacagcctttctgaactgactgaactagagcttgcagtgaagtgttctgctgagactgagcaccttacagatatttttctccagaagatggtgctgggtaataaaatcatcacaattagggaatggttagtggtctctactgtggcaaatgccaactgttggaattcactttattgtagaaaaacccaaactgagactcttaagttttgtttagcaatgtgtttctggtatgaaacaaactactgtgtcactgtccaggtaggaaacaattctttcaactgggttttcagcataaatgggaactgatgtagaaggcaggatttagcccttctaggcaaaagaaaagctcagttgggtttcacgagtgttcctgtgcttatattcagtctgtgcctacatgttctcatgcatgtctaacctgatttacctcttacctgtaacctaccttatcatgtggcttttaattgacagtcactcagccatttctaagcagatatagtagtacctttcagaactcacattggcaagtgtaaaaagatgacttaaggtgaagtgaggacaaaatcacattctgcatactaacctatttttttctccctttaaggtgctaaacttgcacctcatgtccactcagtaacaagtattgggacgtagagcacagcctcactcagctctgaaaggtaatacagcttgtgaggaagtgagccagcagtggcctttgcaattgtggatcttgagctctgctctcagcagatttcaggtgtaaccatttgttaactgtactgaaggtgtgtcctcaagaagaaagtgttcaaattaaaaaagctgctgccaagtacaaaaaaaaaaaaaaaaaaaa

SEQ ID NO: 62 - DNA, 3301 bp, Homo sapiens
gtgcctcttgcagcagcctaacccagaagcaggggggaatcctgaatcgagctgagagggcttccccggttctcctgggaaccccatcggccccctgccagcacacacctgagcagcatcacaggacatggccccctcagccacctagctggggcccatctaggagtggcatcttttttggtgccctgaaggccagctctggaccttcccaggaaaagtgccagctcacagaactgcttgaccaaaggaccggctcttgagacatcccccaacccacctggcccccagctagggtgggggctccaggagactgagattagcctgccctctttggacagcagctccaggacagggcgggtgggctgaccacccaaaccccatctgggcccaggccccatgccccgaggaggggtggtctgaagcccaccagagccccctgccagactgtctgcctcccttctgactgtggccgcttggcatggccagcaacagcagctcctgcccgacacctgggggcgggcacctcaatgggtacccggtgcctccctacgccttcttcttcccccctatgctgggtggactctccccgccaggcgctctgaccactctccagcaccagcttccagttagtggatatagcacaccatccccagccaccattgagacccagagcagcagttctgaagagatagtgcccagccctccctcgccaccccctctaccccgcatctacaagccttgctttgtctgtcaggacaagtcctcaggctaccactatggggtcagcgcctgtgagggctgcaagggcttcttccgccgcagcatccagaagaacatggtgtacacgtgtcaccgggacaagaactgcatcatcaacaaggtgacccggaaccgctgccagtactgccgactgcagaagtgctttgaagtgggcatgtccaaggagtctgtgagaaacgaccgaaacaagaagaagaaggaggtgcccaagcccgagtgctctgagagctacacgctgacgccggaggtgggggagctcattgagaaggtgcgcaaagcgcaccaggaaaccttccctgccctctgccagctgggcaaatacactacgaacaacagctcagaacaacgtgtctctctggacattgacctctgggacaagttcagtgaactctccaccaagtgcatcattaagactgtggagttcgccaagcagctgcccggcttcaccaccctcaccatcgccgaccagatcaccctcctcaaggctgcctgcctggacatcctgatcctgcggatctgcacgcggtacacgcccgagcaggacaccatgaccttctcggacgggctgaccctgaaccggacccagatgcacaacgctggcttcggccccctcaccgacctggtctttgccttcgccaaccagctgctgcccctggagatggatgatgcggagacggggctgctcagcgccatctgcctcatctgcggagaccgccaggacctggagcagccggaccgggtggacatgctgcaggagccgctgctggaggcgctaaaggtctacgtgcggaagcggaggcccagccgcccccacatgttccccaagatgctaatgaagattactgacctgcgaagcatcagcgccaagggggctgagcgggtgatcacgctgaagatggagatcccgggctccatgccgcctctcatccaggaaatgttggagaactcagagggcctggacactctgagcggacagccggggggtggggggcgggacgggggtggcctggcccccccgccaggcagctgtagccccagcctcagccccagctccaacagaagcagcccggccacccactccccgtgaccgcccacgccacatggacacagccctcgccctccgccccggcttttctctgcctttctaccgaccatgtgaccccgcaccagccctgcccccacctgccctcccgggcagtactggggaccttccctgggggacggggagggaggaggcagcgactccttggacagaggcctgggccctcagtggactgcctgctcccacagcctgggctgacgtcagaggccgaggccaggaactgagtgaggcccctggtcctgggtctcaggatgggtcctgggggcctcgtgttcatcaagacacccctctgcccagctcaccacatcttcatcaccagcaaacgccaggacttggctcccccatcctcagaactcacaagccattgctccccagctggggaacctcaacctcccccctgcctcggttggtgacagagggggtgggacaggggcggggggttccccctgtacataccctgccataccaaccccaggtattaattctcgctggttttgtttttattttaatttttttgttttgatttttttaataagaattttcattttaagcacatttatactgaaggaatttgtgctgtgtattggggggagctggatccagagctggagggggtgggtccgggggagggagtggctcggaaggggcccccactctcctttcatgtccctgtgccccccagttctcctcctcagccttttcctcctcagttttctctttaaaactgtgaagtactaactttccaaggcctgccttcccctccctcccactggagaagccgccagcccctttctccctctgcctgaccactgggtgtggacggtgtggggcagccctgaaaggacaggctcctggccttggcacttgcctgcacccaccatgaggcatggagcagggcagagcaagggccccgggacagagttttcccagacctggctcctcggcagagctgcctcccgtcagggcccacatcatctaggctccccagcccccactgtgaaggggctggccaggggcccgagctgcccccacccccggcctcagccaccagcacccccatagggcccccagacaccacacacatgcgcgtgcgcacacacacaaacacacacacactggacagtagatgggccgacacacacttggcccgagttcctccatttccctggcctgccccccacccccaacctgtcccacccccgtgccccctccttaccccgcaggacgggcctacaggggggtctcccctcacccctgcacccccagctgggggagctggctctgccccgacctccttcaccaggggttggggccccttcccctggagcccgtgggtgcacctgttactgttgggctttccactgagatctactggataaagaataaagttctatttattctaaaaaaaaaaaaaaaaaa

SEQ ID NO: 63 - DNA, 1415 bp, Homo sapiens
attgaaggctgggcagagtctgagtccacccgggtcgtgctccccccgctcgcccggctcctccgcagtccaggaatctccccgtggctctccccgacctggaggggtggacgcccctggcccccagtccccggcctgcggagggggccggtggctgcggccctgcgcggggccggggcgggccgagccaagggccgcccccggccgaccctccccctgccgggcccgccctccccgccgcggcgctggaggagggcggggcggggccctggggtcagtctgagcctccggcaccggccgcgcagctggaggcggcggagcggaagccttgacttcatctcagctccagagcccgccctctcttcctgcagcctgggaacttcagccggctggagccccaccatggctgcaatccgaaagaagctggtgatcgttggggatggtgcctgtgggaagacctgcctcctcatcgtcttcagcaaggatcagtttccggaggtctacgtccctactgtctttgagaactatattgcggacattgaggtggacggcaagcaggtggagctggctctgtgggacacagcagggcaggaagactatgatcgactgcggcctctctcctacccggacactgatgtcatcctcatgtgcttctccatcgacagccctgacagcctggaaaacattcctgagaagtggaccccagaggtgaagcacttctgccccaacgtgcccatcatcctggtggggaataagaaggacctgaggcaagacgagcacaccaggagagagctggccaagatgaagcaggagcccgttcggtctgaggaaggccgggacatggcgaaccggatcagtgcctttggctaccttgagtgctcagccaagaccaaggagggagtgcgggaggtgtttgagatggccactcgggctggcctccaggtccgcaagaacaagcgtcggaggggctgtcccattctctgagatccccaaggcctttcctacatgccccctcccttcacaggggtacagaaattatccccctacaaccccagcctcctgagggctccatgctgaaggctcccattttcagttccctcctgcccaggactgcattgttttctagccccgaggtggtggcacgggccctccctcccagcgctctgggagccacgcctatgccctgcccttcctcagggcccctggggatcttgccccctttgaccttccccaaaggatggtcacacaccagcactttatacacttctggctcacaggaaagtgtctgcagtaggggacccagagtcccaggcccctggagttgttttcggcaggggccttgtctctcactgcatttggtcaggggggcatgaataaaggctacaggctccaacgtgaaaaaaaaaaaaaaaaaa

SEQ ID NO: 64 - DNA, 1112 bp, Homo sapiens
tagcacttcatagactgctatcacgcattcatttttactagtacctattgaacactaagttccaggcactgggctaggcactgggatggtgtggtgagcaaaaactgaccagtcctgccgtggagtttgctgggggagacacatgttactcaaagaatcacactaaggatagcaatttatctcaaagctgcaagttcctgccatctacatgtgcccagagtccccaaaattgagtgtcaaacagaggctgggtgacctcctgtccaggattgctctcatcgtatgaatcgaagttttcatcttaacgtgtttttttctcctgagaataggccaaccaatcaatggctcagacagataagccaacatgcatcccgccggagctgccgaagatgctgaaggagtttgccaaagccgccattagggtgcagccgcaggacctcatccagtgggcagccgattattttgaggccctgtcccgtggagagacgcctccggtgagagagcggtctgagcgagtcgctttgtgtaaccgggcagagctaacacctgagctgttaaagatcctgcattctcaggttgctggcagactgatcatccgtgcagaggagctggcccagatgtggaaagtggtgaatctcccaacagatctgtttaatagtgtgatgaatgtgggtcgcttcacggaggagatcgagtggctgaagtttttagcccttgcttgcagcgctctgggagttactattaccaaaactctcaagatagtgtgtgaggtcttatcatgtgaccataatggtgggtcgccccggatcccgttcagcaccttccagtttctctacacgtatattgccaaagtggatggggagatctctgcatcacatgtcagcaggatgctaaactacatggaacaggaagtaattggccctgatggtataatcacagtgaatgactttacccaaaaccccagggttcagctggagtaaaagcacaattttggcaattttaaaggaagatacagagatgattgtacttcagaatgactgaaacccatataccacccaaaatccattttcttgtacaactggtacacactaataaacaattaaaaaaaaaaa

SEQ ID NO: 65 - DNA, 450 bp, Homo sapiens
gtccaaacacacacatctcactcatccttctactcgtgacgcttcccagctctggctttttgaaagcaaagatgagcaacactcaagctgagaggtccataataggcatgatcgacatgtttcacaaatacaccagacgtgatgacaagattgagaagccaagcctgctgacgatgatgaaggagaacttccccaacttccttagtgcctgtgacaaaaagggcacaaattacctcgccgatgtctttgagaaaaaggacaagaatgaggataagaagattgatttttctgagtttctgtccttgctgggagacatagccacagactaccacaagcagagccatggagcagcgccctgttccgggggcagccagtgacccagccccaccaatgggcctccagagaccccaggaacaataaaatgtcttctcccaccagaaaaaaaaaaaa

SEQ ID NO: 66 - DNA, 532 bp, Homo sapiens
gagaaaccagagactgtagcaactctggcagggagaagctgtctctgatggcctgaagctgtgggcagctggccaagcctaaccgctataaaaaggagctgcctctcagccctgcatgtctcttgtcagctgtctttcagaagacctggtggggcaagtccgtgggcatcatgttgaccgagctggagaaagccttgaactctatcatcgacgtctaccacaagtactccctgataaaggggaatttccatgccgtctacagggatgacctgaagaaattgctagagaccgagtgtcctcagtatatcaggaaaaagggtgcagacgtctggttcaaagagttggatatcaacactgatggtgcagttaacttccaggagttcctcattctggtgataaagatgggcgtggcagcccacaaaaaaagccatgaagaaagccacaaagagtagctgagttactgggcccagaggctgggcccctggacatgtacctgcagaataataaagtcatcaatacctcaaaaaaaaaa

SEQ ID NO: 67 - DNA, 586 bp, Homo sapiens
aaacactctgtgtggctcctcggctttgacagagtgcaagacgatgacttgcaaaatgtcgcagctggaacgcaacatagagaccatcatcaacaccttccaccaatactctgtgaagctggggcacccagacaccctgaaccagggggaattcaaagagctggtgcgaaaagatctgcaaaattttctcaagaaggagaataagaatgaaaaggtcatagaacacatcatggaggacctggacacaaatgcagacaagcagctgagcttcgaggagttcatcatgctgatggcgaggctaacctgggcctcccacgagaagatgcacgagggtgacgagggccctggccaccaccataagccaggcctcggggagggcaccccctaagaccacagtggccaagatcacagtggccacggccacggccacagtcatggtggccacggccacagccactaatcaggaggccaggccaccctgcctctacccaaccagggccccggggcctgttatgtcaaactgtcttggctgtggggctaggggctggggccaaataaagtctcttcctccaagtcaaaaaaaaaa

SEQ ID NO: 68 - DNA, 3493 bp, Homo sapiens
agagaagaggctccacgttgggcggggatggggcctgaaactgtctgggtctgagctggggagcggaagccacttgtccctctccctccccaggacttctgtgactcctgggccacagaggtccaaccaggctaagggcctggggataccccctgcctggcccccttgcccaaactggcaggggggccaggctgggcagcagcccctctttcacctcaactatggatctcctgccccccaagcccaagtacaatccactccggaatgagtctctgtcatcgctggaggaaggggcttctgggtccacccccccggaggagctgccttccccatcagcttcatccctggggcccatcctgcctcctctgcctggggacgatagtcccactaccctgtgctccttcttcccccggatgagcaacctgaggctggccaacccggctggggggcgcccagggtctaagggggagccaggaagggcagctgatgatggggaggggatcgtaggggcagccatgccagactcaggccccctacccctcctccaggacatgaacaagctgagtggaggcggcgggcgcaggactcgggtggaagggggccagcttgggggcgaggagtggacccgccacgggagctttgtcaataagcccacgcggggctggctgcatcccaacgacaaagtcatgggacccggggtttcctacttggttcggtacatgggttgtgtggaggtcctccagtcaatgcgtgccctggacttcaacacccggactcaggtcaccagggaggccatcagtctggtgtgtgaggctgtgccgggtgctaagggggcgacaaggaggagaaagccctgtagccgcccgctcagctctatcctggggaggagtaacctgaaatttgctggaatgccaatcactctcaccgtctccaccagcagcctcaacctcatggccgcagactgcaaacagatcatcgccaaccaccacatgcaatctatctcatttgcatccggcggggatccggacacagccgagtatgtcgcctatgttgccaaagaccctgtgaatcagagagcctgccacattctggagtgtcccgaagggcttgcccaggatgtcatcagcaccattggccaggccttcgagttgcgcttcaaacaatacctcaggaacccacccaaactggtcacccctcatgacaggatggctggctttgatggctcagcatgggatgaggaggaggaagagccacctgaccatcagtactataatgacttcccggggaaggaaccccccttggggggggtggtagacatgaggcttcgggaaggagccgctccaggggctgctcgacccactgcacccaatgcccagacccccagccacttgggagctacattgcctgtaggacagcctgttgggggagatccagaagtccgcaaacagatgccacctccaccaccctgtccaggcagagagctttttgatgatccctcctatgtcaacgtccagaacctagacaaggcccggcaagcagtgggtggtgctgggccccccaatcctgctatcaatggcagtgcaccccgggacctgtttgacatgaagcccttcgaagatgctcttcgcgtgcctccacctccccagtcggtgtccatggctgagcagctccgaggggagccctggttccatgggaagctgagccggcgggaggctgaggcactgctgcagctcaatggggacttcctggtacgggagagcacgaccacacctggccagtatgtgctcactggcttgcagagtgggcagcctaagcatttgctactggtggaccctgagggtgtggttcggactaaggatcaccgctttgaaagtgtcagtcaccttatcagctaccacatggacaatcacttgcccatcatctctgcgggcagcgaactgtgtctacagcaacctgtggagcggaaactgtgatctgccctagcgctctcttccagaagatgccctccaatcctttccaccctattccctaactctcgggacctcgtttgggagtgttctgtgggcttggccttgtgtcagagctgggagtagcatggactctgggtttcatatccagctgagtgagagggtttgagtcaaaagcctgggtgagaatcctgcctctccccaaacattaatcaccaaagtattaatgtacagagtggcccctcacctgggcctttcctgtgccaacctgatgccccttccccaagaaggtgagtgcttgtcatggaaaatgtcctgtggtgacaggcccagtggaacagtcacccttctgggcaagggggaacaaatcacacctctgggcttcagggtatcccagacccctctcaacacccgccccccccatgtttaaactttgtgcctttgaccatctcttaggtctaatgatattttatgcaaacagttcttggacccctgaattcaatgacagggatgccaacaccttcttggcttctgggacctgtgttcttgctgagcaccctctccggtttgggttgggataacagaggcaggagtggcagctgtcccctctccctggggatatgcaacccttagagattgccccagagccccactcccggccaggcgggagatggacccctcccttgctcagtgcctcctggccggggcccctcaccccaaggggtctgtatatacatttcataaggcctgccctcccatgttgcatgcctatgtactctacgccaaagtgcagcccttcctcctgaagcctctgccctgcctccctttctgggagggcggggtgggggtgactgaatttgggcctcttgtacagttaactctcccaggtggattttgtggaggtgagaaaaggggcattgagactataaagcagtagacaatccccacataccatctgtagagttggaactgcattcttttaaagttttatatgcatatattttagggctgtagacttactttcctattttcttttccattgcttattcttgagcacaaaatgataatcaattattacatttatacatcacctttttgacttttccaagcccttttacagctcttggcattttcctcgcctaggcctgtgaggtaactgggatcgcaccttttataccagagacctgaggcagatgaaatttatttccatctaggactagaaaaacttgggtctcttaccgcgagactgagaggcagaagtcagcccgaatgcctgtcagtttcatggaggggaaacgcaaaacctgcagttcctgagtaccttctacaggcccggcccagcctaggcccggggtggccacaccacagcaagccggccccccctcttttggccttgtggataagggagagttgaccgttttcatcctggcctccttttgctgtttggatgtttccacgggtctcacttataccaaagggaaaactcttcattaaagtccgtatttcttctaaaaaaaaaaaaaaaa

SEQ ID NO: 69 - DNA, 2974 bp, Homo sapiens
gtgtgcgtgatggagaaaattgggcaccagggctgctcccgagattctcagatctgatttccacgcttgctaccaaaatagtctgggcaggccacttttggaagtaggcgttatctagtgagcaggcggccgctttcgatttcgctttcccctaaatggctgagcttctcgccagcgcaggatcagcctgttcctgggactttccgagagccccgccctcgttccctcccccagccgccagtaggggaggactcggcggtacccggagcttcaggccccaccggggcgcggagagtcccaggcccggccgggaccgggacggcgtccgagtgccaatggctagctctaggtgtcccgctccccgcgggtgccgctgcctccccggagcttctctcgcatggctggggacagtactgctacttctcgccgactgggtgctgctccggaccgcgctgccccgcatattctccctgctggtgcccaccgcgctgccactgctccgggtctgggcggtgggcctgagccgctgggccgtgctctggctgggggcctgcggggtcctcagggcaacggttggctccaagagcgaaaacgcaggtgcccagggctggctggctgctttgaagccattagctgcggcactgggcttggccctgccgggacttgccttgttccgagagctgatctcatggggagcccccgggtccgcggatagcaccaggctactgcactggggaagtcaccctaccgccttcgttgtcagttatgcagcggcactgcccgcagcagccctgtggcacaaactcgggagcctctgggtgcccggcggtcagggcggctctggaaaccctgtgcgtcggcttctaggctgcctgggctcggagacgcgccgcctctcgctgttcctggtcctggtggtcctctcctctcttggggagatggccattccattctttacgggccgcctcactgactggattctacaagatggctcagccgataccttcactcgaaacttaactctcatgtccattctcaccatagccagtgcagtgctggagttcgtgggtgacgggatctataacaacaccatgggccacgtgcacagccacttgcagggagaggtgtttggggctgtcctgcgccaggagacggagtttttccaacagaaccagacaggtaacatcatgtctcgggtaacagaggacacgtccaccctgagtgattctctgagtgagaatctgagcttatttctgtggtacctggtgcgaggcctatgtctcttggggatcatgctctggggatcagtgtccctcaccatggtcaccctgatcaccctgcctctgcttttccttctgcccaagaaggtgggaaaatggtaccagttgctggaagtgcaggtgcgggaatctctggcaaagtccagccaggtggccattgaggctctgtcggccatgcctacagttcgaagctttgccaacgaggagggcgaagcccagaagtttagggaaaagctgcaagaaataaagacactcaaccagaaggaggctgtggcctatgcagtcaactcctggaccactagtatttcaggtatgctgctgaaagtgggaatcctctacattggtgggcagctggtgaccagtggggctgtaagcagtgggaaccttgtcacatttgttctctaccagatgcagttcacccaggctgtggaggtactgctctccatctaccccagagtacagaaggctgtgggctcctcagagaaaatatttgagtacctggaccgcacccctcgctgcccacccagtggtctgttgactcccttacacttggagggccttgtccagttccaagatgtctcctttgcctacccaaaccgcccagatgtcttagtgctacaggggctgacattcaccctacgccctggcgaggtgacggcgctggtgggacccaatgggtctgggaagagcacagtggctgccctgctgcagaatctgtaccagcccaccgggggacagctgctgttggatgggaagccccttccccaatatgagcaccgctacctgcacaggcaggtggctgcagtgggacaagagccacaggtatttggaagaagtcttcaagaaaatattgcctatggcctgacccagaagccaactatggaggaaatcacagctgctgcagtaaagtctggggcccatagtttcatctctggactccctcagggctatgacacagaggtagacgaggctgggagccagctgtcagggggtcagcgacaggcagtggcgttggcccgagcattgatccggaaaccgtgtgtacttatcctggatgatgccaccagtgccctggatgcaaacagccagttacaggtggagcagctcctgtacgaaagccctgagcggtactcccgctcagtgcttctcatcacccagcacctcagcctggtggagcaggctgaccacatcctctttctggaaggaggcgctatccgggaggggggaacccaccagcagctcatggagaaaaaggggtgctactgggccatggtgcaggctcctgcagatgctccagaatgaaagccttctcagacctgcgcactccatctccctcccttttcttctctctgtggtggagaaccacagctgcagagtaggcagctgcctccaggatgagttacttgaaatttgccttgagtgtgttacctcctttccaagctcctcgtgataatgcagacttcctggagtacaaacacaggatttgtaattccttactgtaacggagtttagagccagggctgatgctttggtgtggccagcactctgaaactgagaaatgttcagaatgtacggaaagatgatcagctattttcaacataactgaaggcatatgctggcccataaacaccctgtaggttcttgatatttataataaaattggtgttttgtaaaaaaaaaaaaaaaaaaaaaaa

SEQ ID NO: 70 - DNA, 5154 bp, Homo sapiens
aggggacgcagcgaaaccggggcccgcgccaggccagccgggacggacgccgatgcccggggctgcgacggctgcagagcgagctgccctcggaggccggcgtggggaagatggcccagtccaccgccacctcccctgatgggggcaccacgtttgagcacctctggagctctctggaaccagacagcacctacttcgaccttccccagtcaagccgggggaataatgaggtggtgggcggaacggattccagcatggacgtcttccacctggagggcatgactacatctgtcatggcccagttcaatctgctgagcagcaccatggaccagatgagcagccgcgcggcctcggccagcccctacaccccagagcacgccgccagcgtgcccacccactcgccctacgcacaacccagctccaccttcgacaccatgtcgccggcgcctgtcatcccctccaacaccgactaccccggaccccaccactttgaggtcactttccagcagtccagcacggccaagtcagccacctggacgtactccccgctcttgaagaaactctactgccagatcgccaagacatgccccatccagatcaaggtgtccaccccgccacccccaggcaccgccatccgggccatgcctgtttacaagaaagcggagcacgtgaccgacgtcgtgaaacgctgccccaaccacgagctcgggagggacttcaacgaaggacagtctgctccagccagccacctcatccgcgtggaaggcaataatctctcgcagtatgtggatgaccctgtcaccggcaggcagagcgtcgtggtgccctatgagccaccacaggtggggacggaattcaccaccatcctgtacaacttcatgtgtaacagcagctgtgtagggggcatgaaccggcggcccatcctcatcatcatcaccctggagatgcgggatgggcaggtgctgggccgccggtcctttgagggccgcatctgcgcctgtcctggccgcgaccgaaaagctgatgaggaccactaccgggagcagcaggccctgaacgagagctccgccaagaacggggccgccagcaagcgtgccttcaagcagagcccccctgccgtccccgcccttggtgccggtgtgaagaagcggcggcatggagacgaggacacgtactaccttcaggtgcgaggccgggagaactttgagatcctgatgaagctgaaagagagcctggagctgatggagttggtgccgcagccactggtggactcctatcggcagcagcagcagctcctacagaggccgagtcacctacagcccccgtcctacgggccggtcctctcgcccatgaacaaggtgcacgggggcatgaacaagctgccctccgtcaaccagctggtgggccagcctcccccgcacagttcggcagctacacccaacctggggcccgtgggccccgggatgctcaacaaccatggccacgcagtgccagccaacggcgagatgagcagcagccacagcgcccagtccatggtctcggggtcccactgcactccgccacccccctaccacgccgaccccagcctcgtcagttttttaacaggattggggtgtccaaactgcatcgagtatttcacctcccaagggttacagagcatttaccacctgcagaacctgaccattgaggacctgggggccctgaagatccccgagcagtaccgcatgaccatctggcggggcctgcaggacctgaagcagggccacgactacagcaccgcgcagcagctgctccgctctagcaacgcggccaccatctccatcggcggctcaggggaactgcagcgccagcgggtcatggaggccgtgcacttccgcgtgcgccacaccatcaccatccccaaccgcggcggcccaggcggcggccctgacgagtgggcggacttcggcttcgacctgcccgactgcaaggcccgcaagcagcccatcaaggaggagttcacggaggccgagatccactgagggcctcgcctggctgcagcctgcgccaccgcccagagacccaagctgcctcccctctccttcctgtgtgtccaaaactgcctcaggaggcaggaccttcgggctgtgcccggggaaaggcaaggtccggcccatccccaggcacctcacaggccccaggaaaggcccagccaccgaagccgcctgtggacagcctgagtcacctgcagaaccttctggagctgccctagtgctgggcttgtggggcgggggctggcccactctcagccctgccactgccccggcgtgctccatggcaggcgtgggtggggaccgcagcgtcggctccgacttccaggcttcatcctagagactgtcatctcccaaccaggcgaggtccttccaaaggaaaggatcctctttgctgatggactgccaaaaagtattttgcgacatcttttggttctggatagtagtgagcagccaagtgactgtgtctgaaacaccagtgtattttcagggaatgtccctaactgcgtcttgcccgcgccgggggctggggactctctctgctggacttgggactggcctctgcccccagcacgctgtattctgcaggaccgcctccttcctgcccctaacaacaaccacagtgttgctgaaattggagaaaactggggagggcgcaaccccccccaggcgcggggaagcatgtggtaccgcctcagccagtgcccctcagcctggccacagtcgcctctcctcggggacccctcagcagaaagggacagcctgtccttagaggactggaaattgtcaatatttgataaaatgatacccttttctacatggtgggtcagcttttttttttttttttttaactttctttctcagcattctctttggagttcaacctagcgcccatgagccaggctgaggaagctgagtgagaagccaggtgggcgggacttgttcccaggaaggccgggtggggaggaagcctagagggaaccccaggaagggcaaatccaggcaaatctgcaggaatgctctgccatgggagcagctcctcccttgccacggccaccttctctagcactgcaaggtccacagggcattgctttcctttctaggcggtggcagtcagggaacagactgaggtaggtgtaggggggtctaggccttcgtggagcaccccagggagttagtaggccccggggagacagagtctgcacaggccctttctggggccacctccatccacgaggagcagcctgagccttggtggccgaaccttgaccgtcccggagcacagcttcagggcagggaaccggagcccctggggggcctcacgggtgtgacgaggcccttcattgcaggcaggtgggccaatgggagccctcacccacgcaagccgagacaccacccagagtgcaggctgcctggccccttctggcacggccagctccacaccccctgcctagggtatgtgtggtcctaagggctaggagcttcccctactaacatctcccagaaaaagcagttaagcccctcagggcacagcaaggttagacacagcccccatccccagatcaggactccatcttgctaagtggcatcaccgtcaccagcctccccttatttaaaagcagcgactggtgttgccgcaggtacctggtctacgaagacgcaggcatccctctcccaccgtccacctccccgggggccgctgacagcacagtcgcctgggtgcacgcttgtgggggcagcaggaacggggctgtcggctctcaggggatctggctgcagccagggcgagggcctggcccttccttccagctccttccggctccttccagctgaagggcaggaagctctggccgcttagcttctagggttccatctccctagaaaggtgcccacgcccagggcatcagtcagtagcggcagcagcagcagactcggggctttcccagggtggcgcagccaccccagctgcatgtcacctcagctctccatcttattgccattttgtagatgaggaagctgagaccagaaaggctaagacccatgccccaggcaccacacccatctcttgggggctgggcacctgctacccgaggccacctcctgaagcccccactcttcccccatgttccacttcaggagccgcgggggcccatcctgacacccggggttcctcagcccagcgcagatgtgcttcagttccagagggcttgttgatttgtttcttaggtacgttacctgtccaccctgagtccagtgaggctgtcccaagagcccctgtagtgtgctcctgggaagggctgggggggctgggggggctgggagaggcccaggggcagctgtcactggaaccccagccagatgtccaaggaagccggccagaacacggagcagccagatggccccagctgcacctgtctagggagcccatgcagcctccttgcactggagaagcagctgtgaaagtagacagagttgagacttcgccgtggtcaggagaaaatgcaaattcccaggaacaagaatcctttaagtgatatgtttttataaaactaaacaaatcaacaaataaatcttgaaggcggatggttttcccagcagtgcaggggttggagggaggctgctggcactcctggggccaagggggacaggcagtggtcctgagtctgctcagagaggcaaggcagaaggagctcgccaggcaggtcagctcacatctgtccaagtcgctctggtcagaaacagcgactctcccccattcccccagcgttcccaccaggcctgggctgctgggaagcccttgctgtacccaggagcccgacccgcagtatcctggcacagagccacttgtcactcagaacagtcagtgtctccaacgcacaaacatccactcctctgttaccagttaaagcactttaatgctttaaggtgaaaacgaaatcccatccgtgtttttcgtgtaagatcgtgcttctccgagcagtattaatggacgccctccaatgacataacaactgtttttggtaatgtaatcttgggaaaatgtgttatttttttagctgtgtttcagtggggatttttgtttttgtaacataataaagtgtatgttccaatgaaaaaaaaaaaa

SEQ ID NO: 71 - DNA, 627 bp, Homo sapiens
agtctccggcgagttgttgcctgggctggacgtggttttgtctgctgcgcccgctcttcgcgctctcgtttcattttctgcagcgcgccacgaggatggcccacaagcagatctactactcggacaagtacttcgacgaacactacgagtaccggcatgttatgttacccagagaactttccaaacaagtacctaaaactcatctgatgtctgaagaggagtggaggagacttggtgtccaacagagtctaggctgggttcattacatgattcatgagccagaaccacatattcttctctttagacgacctcttccaaaagatcaacaaaaatgaagtttatctggggatcgtcaaatctttttcaaatttaatgtatatgtgtatataaggtagtattcagtgaatacttgagaaatgtacaaatctttcatccatacctgtgcatgagctgtattcttcacagcaacagagctcagttaaatgcaactgcaagtaggttactgtaagatgtttaagataaaagttcttccagtcagtttttctcttaagtgcctgtttgagtttactgaaacagtttacttttgttcaataaagtttgtatgttgcatttaaaaaaaaaaaaaaa

SEQ ID NO: 72 - DNA, 1811 bp, Homo sapiens
agcagtcctgtcatgcggaagtagcagtccggtcctagggactagcaggtgggttggttgggcgcaggaggacgggggcgcgcttcccataacattaccctggctgagcgtgaggctccagggctgggcaccgggttgacctcttattcctcgctgagggcatcgttaccgcctgtggctgcaagccgaggcgcgcgggtggaaactgggtcgaggtctgggtagacgtctgagcgatctgcacaaggagtggcgcagtctggaatttgattgaggattcctaacgccctccgcttgatgttctggtgattcccgggggctcggcttcggaggaaggcaccaagaaactgataatgttcctttgaattggcttctgtatttgcttcatcaatgtctctcatactgaatatcttaagagagatgctggaatattttggcgttcctgtagaacaggttttgctgatttgggaaaataaagactatggatcaactaggagtattgttcgtattattgggaaaatgcttccactggaaccttgtcgaagacctaattttgagttgatcccgctcttgaactctgtagactctgataattgtggatctatggttccatcttttgctgatattttgtatgtggcaaatgatgaagaagccagttatctcagatttcgaaatagtatatggaaaaatgaagaagagaaagtggaaatttttcatcctttgcgactagttcgggatccactgtcacctgctgtaagacagaaagaaactgtgaaaaatgacctgcctgtaaatgaagctgcaattagaaaaatagctgcccttgaaaatgagctgacttttcttcgctctcagattgcagcaattgtggaaatgcaggaactgaaaaatagtacaaattctagttcctttggcttgagtgacgagcgcattagtttgggtcagctgtcatcatcgcgggctgcccatctgagtgtggacccagatcagcttccaggttcagtgctttctcctcctcctcctccaccacttcctcctcagttttcatctctccagccaccgtgttttcctcccgtacaaccaggatctaataatatttgtgactcagataatccagcaactgaaatgagcaaacagaacccggctgctaataagaccaattatagtcatcattcaaaaagccagagaaataaagatattccaaacatgttggacgttctaaaggatatgaataaggttaagcttcgtgcaattgagcggtcacctggcggtagacccattcataagaggaaaagacagaattcacattgggatccagtttctttaatatctcatgcacttaaacagaaatttgcatttcaagaagatgattcttttgagaaagagaatagatcttgggaatcttccccattttctagtccagaaacttcaaggtttggacatcacatttcacagtcagaaggacagcgaactaaagaagaaatggtcaacacaaaagctgttgaccaaggtatcagcaacacaagccttctaaactcaaggatttaaactcaacttaaggttgagctttaaacttccaaaacttcttcctggatgataaattattcttagaaactgatttggactgttaaaggctaaaagtagatgtatttaaagactcttcttgacacattttgcctacacttgctatgtaaatatgtatgcctgtcatttttgtttcctttgttcctttttacgtttatactctgttcttctgtacatagagcttaaaataaacattctttttgaacttgaaaaaaaaaaaaaaaaaa

SEQ ID NO: 73 - DNA, 2537 bp, Homo sapiens
ggaagtcccacctgcgcccgacggcggaagttccgggagtgccaagtacccgcgtgcatacggctgccggcatggcacattacaacttcaagaaaattacggtggtgccgtccgccaaggacttcatagacctcacgttgtcgaagactcaacgaaagactccaaccgttattcataaacattaccaaatacatcgcattagacatttttacatgagaaaagtcaaatttactcaacagaattaccatgatagactttcacaaattctaacagatttccccaaattggatgatattcatccgttctatgctgatttgatgaatattctctacgacaaggatcattacaagttggctctggggcaaataaatattgccaaaaatttagtggacaatgttgctaaagattatgtgcgactgatgaagtatggcgactctctctaccgctgcaaacagctgaagcgtgcggccctgggacggatgtgcacagtgatcaagaggcagaagcagagtttggagtatttggagcaagtgcgtcagcatttatcccgtttgccaaccattgatccgaataccaggaccctgcttttgtgtgggtacccaaatgttgggaagtccagcttcatcaacaaggtgacgagagcagacgtggatgtccagccctatgcgttcacaaccaagtctctgtttgttgggcacatggattataagtatctacgttggcaggttgtagacactcctgggatcctggaccaccctctggaggataggaacaccatcgagatgcaggccatcactgccctggcccacctccgtgctgcggtcctgtatgtgatggatttgtctgagcagtgtgggcatgggctgagggagcagctagaactcttccagaacatcagacctctcttcatcaacaagcctctcatagttgtagccaacaaatgtgatgtgaagagaatagctgaactttctgaagatgatcagaaaatatttacagatttgcagtctgaaggattccctgtaatagagaccagcaccctgactgaggaaggtgttattaaagttaaaacagaggcttgcgataggcttttggctcatcgagtggaaaccaaaatgaagggaaataaagtgaatgaggtgctgaatagactgcacctggctatcccaaccaggagggacgataaggagaggccccctttcatccctgaaggagtggtggctcgcaggaagaggatggaaactgaggagtccaggaagaagagggaacgagatcttgagctggaaatgggagatgattatattttggatcttcagaagtactgggatttaatgaatttgtctgaaaaacatgataagataccagaaatctgggaaggccataatatagctgattatattgatccagccatcatgaagaaattggaagaattagaaaaagaagaagagctgagaacagctgctggagagtatgacagtgtatctgagagtgaagacgaagagatgctggaaatccgacagctggcaaagcaaattcgagagaaaaagaagttgaaaattctggagtccaaagaaaagaatacacagggacccaggatgccgcgaactgctaagaaggttcagaggacagttttggagaaggagatgcgtagtcttggtgttgacatggacgataaagacgatgcccattacgcagtccaggcaagaagatcccggagcatcactaggaaaagaaagcgggaagactctgctcccccgtcctctgtggcccggagtgggagttgctctcgaactccacgtgacgtttctggtcttagggatgtcaagatggtgaagaaagccaagactatgatgaagaatgctcagaagaagatgaatcggttggggaagaaaggggaggcggatagacacgtgtttgatatgaagcccaagcacttgctgtctgggaagaggaaagctggtaaaaaggacaggagatagtatccgtttggttggcgtggcttcgctagagtgttgctgtttatttcctggtttggcacagtatggtttcatgaaattggagctctgtataaactgaaaaagacaaaataagtaaagcacttgttgctttgctgaaaactatggttaaccctatataggtgtgggaaatttttgtcactgcataatattacaaatattttgagtagacagtgtttccacatttaatggagtatcagttgcttcagattttcagaactgggaagatttactggtgtaactgggttgtttttgatggagaaaaaccttattttcttttgtaagagctgggagcaaacacgtttatgagtgtgtcggaatcccgtgcttaaaatacgctcttaaattattttctagtcttattttacaatgtctcattgtagtctgtcttcaactattttatccaaaataaacctccagaagaaagtagttttcatttacttagctcatgttttggtttagttatagtcgctatggatttggccaaataaaaaggcaaacaacaaaaaaaaaaaaaaaaaaaaa

SEQ ID NO: 74 - DNA, 1810 bp, Homo sapiens
gggaggctgtagcggccgaccggacgcagggggctggcgggaacgtgaagctccgcggtgcctgatggggccgttgggcggccggtagctgttgctgttgggggaccccctcattcctgccgctgccgtccctgctgcctcatggcggccatcggagttcacctgggctgcacctcagcctgtgtggccgtctataaggatggccgggctggtgtggttgcaaatgatgccggtgaccgagttactccagctgttgttgcttactcagaaaatgaagagattgttggattggcagcaaaacaaagtagaataagaaatatttcaaatacagtaatgaaagtaaagcagatcctgggcagaagctccagtgatccacaagctcagaaatacatcgcggaaagtaaatgtttagtcattgaaaaaaatgggaaattacgatatgaaatagatactggagaagaaacaaaatttgttaacccagaagatgttgccagactgatatttagtaaaatgaaagaaacggcacattctgtattgggctcagatgcaaatgatgtagttattactgtcccgtttgattttggagaaaagcaaaaaaatgctcttggagaagcagctagagctgctggatttaatgttttgcgattaattcacgaaccgtctgcagctcttcttgcttatggaattggacaagactcccctactggaaaaagcaatattttggtgtttaagcttggaggaacatccttatctctcagcgtcatggaagttaacagtggaatatatcgggttctttcaacaaacactgatgataacatcggtggtgcacatttcacagaaaccttagcacagtatctagcttctgagttccaaagatccttcaaacatgatgtgagaggaaatgcgcgagccatgatgaaattaacgaacagtgctgaagtagcgaaacattctttgtcaaccttgggaagtgccaactgttttcttgactcattatatgaaggtcaagattttgattgcaatgtgtccagagcaagatttgaacttctttgttctccactttttaataagtgtatagaagcaatcagaggactcttagatcaaaatggatttacagcagatgatatcaacaaggttgtcctttgtggagggtcttctcgaatcccaaagctacagcaactgattaaagatcttttcccagctgttgagcttctcaattctatccctcctgatgaagtgatccctattggtgcagctatagaagcaggaattcttattgggaaagaaaacctgttggtggaagactctcttatgatagagtgttcagccagagatattttagttaagggtgtggacgaatcaggagccagtagattcacagtgctgtttccatcagggactcctttgccagctcgaagacaacacacattgcaagcccctggaagcatatcttcagtgtgccttgaactctatgagtctgatgggaagaactctgccaaagaggaaaccaagtttgcacaggttgtactccaggatttagataaaaaagaaaatggattacgtgatatattagctgttcttactatgaaaagggatggatctttacatgtgacatgcacagatcaagaaactggaaaatgtgaagcaatctctattgagatagcatcttagtgttttagagaaatcaagaatttttaaaaacaagaatatcaacatttggttttgtgtataagtggtgtttgtattaaaatactttttcaatgaactgtataaactatgttttattaaactacaatatatcagtaaaaaa

SEQ ID NO: 75 - DNA, 1355 bp, Homo sapiens
ggatggccggagctggcgccctggttctggaggtaaccggttactgagggcgagaagcgccacccggaggctctagcctgacaaatgcttgctgacctgggccagagctcttcccttacgcaagtctcagccggtcgtcgcgacgttcgcccgctcgctctgaggctcctgaagccgaaaccagctagactttcctccttcccgcctgcctgtagcggcgttgttgccactccgccaccatgttcgaggcgcgcctggtccagggctccatcctcaagaaggtgttggaggcactcaaggacctcatcaacgaggcctgctgggatattagctccagcggtgtaaacctgcagagcatggactcgtcccacgtctctttggtgcagctcaccctgcggtctgagggcttcgacacctaccgctgcgaccgcaacctggccatgggcgtgaacctcaccagtatgtccaaaatactaaaatgcgccggcaatgaagatatcattacactaagggccgaagataacgcggataccttggcgctagtatttgaagcaccaaaccaggagaaagtttcagactatgaaatgaagttgatggatttagatgttgaacaacttggaattccagaacaggagtacagctgtgtagtaaagatgccttctggtgaatttgcacgtatatgccgagatctcagccatattggagatgctgttgtaatttcctgtgcaaaagacggagtgaaattttctgcaagtggagaacttggaaatggaaacattaaattgtcacagacaagtaatgtcgataaagaggaggaagctgttaccatagagatgaatgaaccagttcaactaacttttgcactgaggtacctgaacttctttacaaaagccactccactctcttcaacggtgacactcagtatgtctgcagatgtaccccttgttgtagagtataaaattgcggatatgggacacttaaaatactacttggctcccaagatcgaggatgaagaaggatcttaggcattcttaaaattcaagaaaataaaactaagctctttgagaactgcttctaagatgccagcatatactgaagtcttttctgtcaccaaatttgtacctctaagtacatatgtagatattgttttctgtaaataacctatttttttctctattctctgcaatttgtttaaagaataaagtccaaagtcagatctggtctagttaacctagaagtatttttgtctcttagaaatacttgtgatttttataatacaaaagggtcttgactctaaatgcagttttaagaattgtttttgaatttaaataaagttacttgaatttcaaacatca

SEQ ID NO: 76 - DNA, 3396 bp, Homo sapiens
gggcttcctcttcgcccgggtggcgttgggcccgcgcgggcgctcgggtgactgcagctgctcagctcccctcccccgccccgcgccgcgcggccgcccgtcgcttcgcacagggctggatggttgtattgggcagggtggctccaggatgttaggaactgtgaagatggaagggcatgaaaccagcgactggaacagctactacgcagacacgcaggaggcctactcctccgtcccggtcagcaacatgaactcaggcctgggctccatgaactccatgaacacctacatgaccatgaacaccatgactacgagcggcaacatgaccccggcgtccttcaacatgtcctatgccaacccgggcctaggggccggcctgagtcccggcgcagtagccggcatgccggggggctcggcgggcgccatgaacagcatgactgcggccggcgtgacggccatgggtacggcgctgagcccgagcggcatgggcgccatgggtgcgcagcaggcggcctccatgaatggcctgggcccctacgcggccgccatgaacccgtgcatgagccccatggcgtacgcgccgtccaacctgggccgcagccgcgcgggcggcggcggcgacgccaagacgttcaagcgcagctacccgcacgccaagccgccctactcgtacatctcgctcatcaccatggccatccagcaggcgcccagcaagatgctcacgctgagcgagatctaccagtggatcatggacctcttcccctattaccggcagaaccagcagcgctggcagaactccatccgccactcgctgtccttcaatgactgcttcgtcaaggtggcacgctccccggacaagccgggcaagggctcctactggacgctgcacccggactccggcaacatgttcgagaacggctgctacttgcgccgccagaagcgcttcaagtgcgagaagcagccgggggccggcggcgggggcgggagcggaagcgggggcagcggcgccaagggcggccctgagagccgcaaggacccctctggcgcctctaaccccagcgccgactcgcccctccatcggggtgtgcacgggaagaccggccagctagagggcgcgccggcccccgggcccgccgccagcccccagactctggaccacagtggggcgacggcgacagggggcgcctcggagttgaagactccagcctcctcaactgcgccccccataagctccgggcccggggcgctggcctctgtgcccgcctctcacccggcacacggcttggcaccccacgagtcccagctgcacctgaaaggggacccccactactccttcaaccacccgttctccatcaacaacctcatgtcctcctcggagcagcagcataagctggacttcaaggcatacgaacaggcactgcaatactcgccttacggctctacgttgcccgccagcctgcctctaggcagcgcctcggtgaccaccaggagccccatcgagccctcagccctggagccggcgtactaccaaggtgtgtattccagacccgtcctaaacacttcctagctcccgggactggggggtttgtctggcatagccatgctggtagcaagagagaaaaaatcaacagcaaacaaaaccacacaaaccaaaccgtcaacagcataataaaatcccaacaactatttttatttcatttttcatgcacaacctttcccccagtgcaaaagactgttactttattattgtattcaaaattcattgtgtatattactacaaagacaaccccaaaccaatttttttcctgcgaagtttaatgatccacaagtgtatatatgaaattctcctccttccttgcccccctctctttcttccctctttcccctccagacattctagtttgtggagggttatttaaaaaaacaaaaaaggaagatggtcaagtttgtaaaatatttgtttgtgctttttccccctccttacctgaccccctacgagtttacaggtctgtggcaatactcttaaccataagaattgaaatggtgaagaaacaagtatacactagaggctcttaaaagtattgaaagacaatactgctgttatatagcaagacataaacagattataaacatcagagccatttgcttctcagtttacatttctgatacatgcagatagcagatgtctttaaatgaaatacatgtatattgtgtatggacttaattatgcacatgctcagatgtgtagacatcctccgtatatttacataacatatagaggtaatagataggtgatatacatgatacattctcaagagttgcttgaccgaaagttacaaggaccccaacccctttgtcctctctacccacagatggccctgggaatcaattcctcaggaattgccctcaagaactctgcttcttgctttgcagagtgccatggtcatgtcattctgaggtcacataacacataaaattagtttctatgagtgtataccatttaaagaatttttttttcagtaaaagggaatattacaatgttggaggagagataagttatagggagctggatttcaaaacgtggtccaagattcaaaaatcctattgatagtggccattttaatcattgccatcgtgtgcttgtttcatccagtgttatgcactttccacagttggacatggtgttagtatagccagacgggtttcattattatttctctttgctttctcaatgttaatttattgcatggtttattctttttctttacagctgaaattgctttaaatgatggttaaaattacaaattaaattgttaatttttatcaatgtgattgtaattaaaaatattttgatttaaataacaaaaataataccagattttaagccgtggaaaatgttcttgatcatttgcagttaaggactttaaataaatcaaatgttaacaaaagagcatttctgttattttttttcacttaactaaatccgaagtgaatatttctgaatacgatatttttcaaattctagaactgaatataaatgacaaaaatgaaaataaaattgttttgtctgttgttataatgaatgtgtagctagtaaaaaggagtgaaagaaattcaagtaaagtgtataagttgatttaatattccaagagttgagatttttaagattctttattcccagtgatgtttacttcatttttttttttttttttgacaccggcttaagccttctgtgtttcctttgagccttttcactacaaaatcaaatattaatttaactacctttcctccttccccaatgtatcacttttctttatctgagaattcttccaatgaaaataaaatatcagctgtggctgatagaattaagttgtgtccaaaaaaaaaaaaaaaaaa

SEQ ID NO: 77 - DNA, 3070 bp, Homo sapiens
ggcgccgtcttgatactttcagaaagaatgcattccctgtaaaaaaaaaaaaaaaatactgagagagggagagagagagagaagaagagagagagacggagggagagcgagacagagcgagcaacgcaatctgaccgagcaggtcgtacgccgccgcctcctcctcctctctgctcttcgctacccaggtgacccgaggagggactccgcctccgagcggctgaggaccccggtgcagaggagcctggctcgcagaattgcagagtcgtcgcccctttttacaacctggtcccgttttattctgccgtacccagtttttggatttttgtcttccccttcttctctttgctaaacgacccctccaagataatttttaaaaaaccttctcctttgctcacctttgcttcccagccttcccatccccccaccgaaagcaaatcattcaacgacccccgaccctccgacggcaggagccccccgacctcccaggcggaccgccctccctccccgcgcgcgggttccgggcccggcgagagggcgcgagcacagccgaggccatggaggtgacggcggaccagccgcgctgggtgagccaccaccaccccgccgtgctcaacgggcagcacccggacacgcaccacccgggcctcagccactcctacatggacgcggcgcagtacccgctgccggaggaggtggatgtgctttttaacatcgacggtcaaggcaaccacgtcccgccctactacggaaactcggtcagggccacggtgcagaggtaccctccgacccaccacgggagccaggtgtgccgcccgcctctgcttcatggatccctaccctggctggacggcggcaaagccctgggcagccaccacaccgcctccccctggaatctcagccccttctccaagacgtccatccaccacggctccccggggcccctctccgtctaccccccggcctcgtcctcctccttgtcggggggccacgccagcccgcacctcttcaccttcccgcccaccccgccgaaggacgtctccccggacccatcgctgtccaccccaggctcggccggctcggcccggcaggacgagaaagagtgcctcaagtaccaggtgcccctgcccgacagcatgaagctggagtcgtcccactcccgtggcagcatgaccgccctgggtggagcctcctcgtcgacccaccaccccatcaccacctacccgccctacgtgcccgagtacagctccggactcttcccccccagcagcctgctgggcggctcccccaccggcttcggatgcaagtccaggcccaaggcccggtccagcacagaaggcagggagtgtgtgaactgtggggcaacctcgaccccactgtggcggcgagatggcacgggacactacctgtgcaacgcctgcgggctctatcacaaaatgaacggacagaaccggcccctcattaagcccaagcgaaggctgtctgcagccaggagagcagggacgtcctgtgcgaactgtcagaccaccacaaccacactctggaggaggaatgccaatggggaccctgtctgcaatgcctgtgggctctactacaagcttcacaatattaacagacccctgactatgaagaaggaaggcatccagaccagaaaccgaaaaatgtctagcaaatccaaaaagtgcaaaaaagtgcatgactcactggaggacttccccaagaacagctcgtttaacccggccgccctctccagacacatgtcctccctgagccacatctcgcccttcagccactccagccacatgctgaccacgcccacgccgatgcacccgccatccagcctgtcctttggaccacaccacccctccagcatggtcaccgccatgggttagagccctgctcgatgctcacagggcccccagcgagagtccctgcagtccctttcgacttgcatttttgcaggagcagtatcatgaagcctaaacgcgatggatatatgtttttgaaggcagaaagcaaaattatgtttgccactttgcaaaggagctcactgtggtgtctgtgttccaaccactgaatctggaccccatctgtgaataagccattctgactcatatcccctatttaacagggtctctagtgctgtgaaaaaaaaaatgctgaacattgcatataacttatattgtaagaaatactgtacaatgactttattgcatctgggtagctgtaaggcatgaaggatgccaagaagtttaaggaatatgggagaaatagtgtggaaattaagaagaaactaggtctgatattcaaatggacaaactgccagttttgtttcctttcactggccacagttgtttgatgcattaaaagaaaataaaaaaaagaaaaaagagaaaagaaaaaaaaagaaaaaagttgtaggcgaatcatttgttcaaagctgttggcctctgcaaaggaaataccagttctgggcaatcagtgttaccgttcaccagttgccgttgagggtttcagagagcctttttctaggcctacatgctttgtgaacaagtccctgtaattgttgtttgtatgtataattcaaagcaccaaaataagaaaagatgtagatttatttcatcatattatacagaccgaactgttgtataaatttatttactgctagtcttaagaactgctttctttcgtttgtttgtttcaatattttccttctctctcaatttttggttgaataaactagattacattcagttggcctaaggtggttgtgctcggagggtttcttgtttcttttccattttgtttttggatgatatttattaaatagcttctaagagtccggcggcatctgtcttgtccctattcctgcagcctgtgctgagggtagcagtgtatgagctaccagcgtgcatgtcagcgaccctggcccgacaggccacgtcctgcaatcggcccggctgcctcttcgccctgtcgtgttctgtgttagtgatcactgcctttaatacagtctgttggaataatattataagcataataataaagtgaaaatattttaaaactacaa

SEQ ID NO: 78 - DNA, 1836 bp, Homo sapiens
ggcacgagggcaagtttgaaaagtgatgacggttgacgtttgctgatttttgactttgcttgtagctgctccccgaactcgccgtcttcctgtcggcggccggcactgtagattaacaggaaacttccaagatggaaactttgtctttccccagatataatgtagctgagattgtgattcatattcgcaataagatcttaacaggagctgatggtaaaaacctcaccaagaatgatctttatccaaatccaaagcctgaagtcttgcacatgatctacatgagagccttacaaatagtatatggaattcgactggaacatttttacatgatgccagtgaactctgaagtcatgtatccacatttaatggaaggcttcttaccattcagcaatttagttactcatctggactcatttttgcctatctgccgggtgaatgactttgagactgctgatattctatgtccaaaagcaaaacggacaagtcggtttttaagtggcattatcaactttattcacttcagagaagcatgccgtgaaacgtatatggaatttctttggcaatataaatcctctgcggacaaaatgcaacagttaaacgccgcacaccaggaggcattaatgaaactggagagacttgattctgttccagttgaagagcaagaagagttcaagcagctttcagatggtattcaggagctacaacaatcactaaatcaggattttcatcaaaaaacgatagtgctgcaagagggaaattcccaaaagaagtcaaatatttcagagaaaaccaagcgtttgaatgaactaaaattgttggtggtttctttgaaagaaatacaagagagtttgaaaacaaaaattgtggattctccagagaagttaaagaattataaagaaaaaatgaaagatacggtccagaagcttaaaaatgccagacaagaagtggtggagaaatatgaaatctatggagactcagttgactgcctgccttcatgtcagttggaagtgcagttatatcaaaagaaaatacaggacctttcagataatagggaaaaattagccagtatcttaaaggagagcctgaacttggaggaccaaattgagagtgatgagtcagaactgaagaaattgaagactgaagaaaattcgttcaaaagactgatgattgtgaagaaggaaaaacttgccacagcacaattcaaaataaataagaagcatgaagatgttaagcaatacaaacgcacagtaattgaggattgcaataaagttcaagaaaaaagaggtgctgtctatgaacgagtaaccacaattaatcaagaaatccaaaaaattaaacttggaattcaacaactaaaagatgctgctgaaagggagaaactgaagtcccaggaaatatttctaaacttgaaaactgctttggagaaataccacgacggtattgaaaaggcagcagaggactcctatgctaagatagatgagaagacagctgaactgaagaggaagatgttcaaaatgtcaacctgattaacaaaattacatgtctttttgtaaatggcttgccatcttttaattttctatttagaaagaaaagttgaagcgaatggaagtatcagaagtaccaaataatgttggcttcatcagtttttatacactctcataagtagttaataagatgaatttaatgtaggcttttattaatttataattaaaataacttgtgcagctattcatgtctctactctgccccttgttgtaaatagtttgagtaaaacaaaactagttacctttgaaatatatatatttttttctgttaaaaaaaaaaaaaaaaaaaaaa

SEQ ID NO: 79 - DNA, 996 bp, Homo sapiens
aatcacttggggaaaggaaggttcgtttctgagttagcaacaagtaaatgcagcactagtgggtgggattgaggtatgccctggtgcataaatagagactcagctgtgctggcacactcagaagcttggaccgcatcctagccgccgactcacacaaggcaggtgggtgaggaaatccagagttgccatggagaaaattccagtgtcagcattcttgctccttgtggccctctcctacactctggccagagataccacagtcaaacctggagccaaaaaggacacaaaggactctcgacccaaactgccccagaccctctccagaggttggggtgaccaactcatctggactcagacatatgaagaagctctatataaatccaagacaagcaacaaacccttgatgattattcatcacttggatgagtgcccacacagtcaagctttaaagaaagtgtttgctgaaaataaagaaatccagaaattggcagagcagtttgtcctcctcaatctggtttatgaaacaactgacaaacacctttctcctgatggccagtatgtccccaggattatgtttgttgacccatctctgacagttagagccgatatcactggaagatattcaaatcgtctctatgcttacgaacctgcagatacagctctgttgcttgacaacatgaagaaagctctcaagttgctgaagactgaattgtaaagaaaaaaaatctccaagcccttctgtctgtcaggccttgagacttgaaaccagaagaagtgtgagaagactggctagtgtggaagcatagtgaacacactgattaggttatggtttaatgttacaacaactattttttaagaaaaacaagttttagaaatttggtttcaagtgtacatgtgtgaaaacaatattgtatactaccatagtgagccatgattttctaaaaaaaaaaataaatgttttgggggtgttctgttttctccaaaaaaaaaaaaaaa

SEQ ID NO: 80 - DNA, 6330 bp, Homo sapiens
aggagctggcggagggcgttcgtcctgggactgcacttgctcccgtcgggtcgcccggcttcaccggacccgcaggctcccggggcagggccggggccagagctcgcgtgtcggcgggacatgcgctgcgtcgcctctaacctcgggctgtgctctttttccaggtggcccgccggtttctgagccttctgccctgcggggacacggtctgcaccctgcccgcggccacggaccatgaccatgaccctccacaccaaagcatctgggatggccctactgcatcagatccaagggaacgagctggagcccctgaaccgtccgcagctcaagatccccctggagcggcccctgggcgaggtgtacctggacagcagcaagcccgccgtgtacaactaccccgagggcgccgcctacgagttcaacgccgcggccgccgccaacgcgcaggtctacggtcagaccggcctcccctacggccccgggtctgaggctgcggcgttcggctccaacggcctggggggtttccccccactcaacagcgtgtctccgagcccgctgatgctactgcacccgccgccgcagctgtcgcctttcctgcagccccacggccagcaggtgccctactacctggagaacgagcccagcggctacacggtgcgcgaggccggcccgccggcattctacaggccaaattcagataatcgacgccagggtggcagagaaagattggccagtaccaatgacaagggaagtatggctatggaatctgccaaggagactcgctactgtgcagtgtgcaatgactatgcttcaggctaccattatggagtctggtcctgtgagggctgcaaggccttcttcaagagaagtattcaaggacataacgactatatgtgtccagccaccaaccagtgcaccattgataaaaacaggaggaagagctgccaggcctgccggctccgcaaatgctacgaagtgggaatgatgaaaggtgggatacgaaaagaccgaagaggagggagaatgttgaaacacaagcgccagagagatgatggggagggcaggggtgaagtggggtctgctggagacatgagagctgccaacctttggccaagcccgctcatgatcaaacgctctaagaagaacagcctggccttgtccctgacggccgaccagatggtcagtgccttgttggatgctgagccccccatactctattccgagtatgatcctaccagacccttcagtgaagcttcgatgatgggcttactgaccaacctggcagacagggagctggttcacatgatcaactgggcgaagagggtgccaggctttgtggatttgaccctccatgatcaggtccaccttctagaatgtgcctggctagagatcctgatgattggtctcgtctggcgctccatggagcacccagggaagctactgtttgctcctaacttgctcttggacaggaaccagggaaaatgtgtagagggcatggtggagatcttcgacatgctgctggctacatcatctcggttccgcatgatgaatctgcagggagaggagtttgtgtgcctcaaatctattattttgcttaattctggagtgtacacatttctgtccagcaccctgaagtctctggaagagaaggaccatatccaccgagtcctggacaagatcacagacactttgatccacctgatggccaaggcaggcctgaccctgcagcagcagcaccagcggctggcccagctcctcctcatcctctcccacatcaggcacatgagtaacaaaggcatggagcatctgtacagcatgaagtgcaagaacgtggtgcccctctatgacctgctgctggagatgctggacgcccaccgcctacatgcgcccactagccgtggaggggcatccgtggaggagacggaccaaagccacttggccactgcgggctctacttcatcgcattccttgcaaaagtattacatcacgggggaggcagagggtttccctgccacggtctgagagctccctggctcccacacggttcagataatccctgctgcattttaccctcatcatgcaccactttagccaaattctgtctcctgcatacactccggcatgcatccaacaccaatggctttctagatgagtggccattcatttgcttgctcagttcttagtggcacatcttctgtcttctgttgggaacagccaaagggattccaaggctaaatctttgtaacagctctctttcccccttgctatgttactaagcgtgaggattcccgtagctcttcacagctgaactcagtctatgggttggggctcagataactctgtgcatttaagctacttgtagagacccaggcctggagagtagacattttgcctctgataagcactttttaaatggctctaagaataagccacagcaaagaatttaaagtggctcctttaattggtgacttggagaaagctaggtcaagggtttattatagcaccctcttgtattcctatggcaatgcatccttttatgaaagtggtacaccttaaagcttttatatgactgtagcagagtatctggtgattgtcaattcattccccctataggaatacaaggggcacacagggaaggcagatcccctagttggcaagactattttaacttgatacactgcagattcagatgtgctgaaagctctgcctctggctttccggtcatgggttccagttaattcatgcctcccatggacctatggagagcagcaagttgatcttagttaagtctccctatatgagggataagttcctgatttttgtttttatttttgtgttacaaaagaaagccctccctccctgaacttgcagtaaggtcagcttcaggacctgttccagtgggcactgtacttggatcttcccggcgtgtgtgtgccttacacaggggtgaactgttcactgtggtgatgcatgatgagggtaaatggtagttgaaaggagcaggggccctggtgttgcatttagccctggggcatggagctgaacagtacttgtgcaggattgttgtggctactagagaacaagagggaaagtagggcagaaactggatacagttctgaggcacagccagacttgctcagggtggccctgccacaggctgcagctacctaggaacattccttgcagaccccgcattgccctttgggggtgccctgggatccctggggtagtccagctcttcttcatttcccagcgtggccctggttggaagaagcagctgtcacagctgctgtagacagctgtgttcctacaattggcccagcaccctggggcacgggagaagggtggggaccgttgctgtcactactcaggctgactggggcctggtcagattacgtatgcccttggtggtttagagataatccaaaatcagggtttggtttggggaagaaaatcctcccccttcctcccccgccccgttccctaccgcctccactcctgccagctcatttccttcaatttcctttgacctataggctaaaaaagaaaggctcattccagccacagggcagccttccctgggcctttgcttctctagcacaattatgggttacttcctttttcttaacaaaaaagaatgtttgatttcctctgggtgaccttattgtctgtaattgaaaccctattgagaggtgatgtctgtgttagccaatgacccaggtgagctgctcgggcttctcttggtatgtcttgtttggaaaagtggatttcattcatttctgattgtccagttaagtgatcaccaaaggactgagaatctgggagggcaaaaaaaaaaaaaaagtttttatgtgcacttaaatttggggacaattttatgtatctgtgttaaggatatgtttaagaacataattcttttgttgctgtttgtttaagaagcaccttagtttgtttaagaagcaccttatatagtataatatatatttttttgaaattacattgcttgtttatcagacaattgaatgtagtaattctgttctggatttaatttgactgggttaacatgcaaaaaccaaggaaaaatatttagtttttttttttttttttgtatacttttcaagctaccttgtcatgtatacagtcatttatgcctaaagcctggtgattattcatttaaatgaagatcacatttcatatcaacttttgtatccacagtagacaaaatagcactaatccagatgcctattgttggatactgaatgacagacaatcttatgtagcaaagattatgcctgaaaaggaaaattattcagggcagctaattttgcttttaccaaaatatcagtagtaatatttttggacagtagctaatgggtcagtgggttctttttaatgtttatacttagattttcttttaaaaaaattaaaataaaacaaaaaaaaatttctaggactagacgatgtaataccagctaaagccaaacaattatacagtggaaggttttacattattcatccaatgtgtttctattcatgttaagatactactacatttgaagtgggcagagaacatcagatgattgaaatgttcgcccaggggtctccagcaactttggaaatctctttgtatttttacttgaagtgccactaatggacagcagatattttctggctgatgttggtattgggtgtaggaacatgatttaaaaaaaaactcttgcctctgctttcccccactctgaggcaagttaaaatgtaaaagatgtgatttatctggggggctcaggtatggtggggaagtggattcaggaatctggggaatggcaaatatattaagaagagtattgaaagtatttggaggaaaatggttaattctgggtgtgcaccagggttcagtagagtccacttctgccctggagaccacaaatcaactagctccatttacagccatttctaaaatggcagcttcagttctagagaagaaagaacaacatcagcagtaaagtccatggaatagctagtggtctgtgtttcttttcgccattgcctagcttgccgtaatgattctataatgccatcatgcagcaattatgagaggctaggtcatccaaagagaagaccctatcaatgtaggttgcaaaatctaacccctaaggaagtgcagtctttgatttgatttccctagtaaccttgcagatatgtttaaccaagccatagcccatgccttttgagggctgaacaaataagggacttactgataatttacttttgatcacattaaggtgttctcaccttgaaatcttatacactgaaatggccattgatttaggccactggcttagagtactccttcccctgcatgacactgattacaaatactttcctattcatactttccaattatgagatggactgtgggtactgggagtgatcactaacaccatagtaatgtctaatattcacaggcagatctgcttggggaagctagttatgtgaaaggcaaatagagtcatacagtagctcaaaaggcaaccataattctctttggtgcaggtcttgggagcgtgatctagattacactgcaccattcccaagttaatcccctgaaaacttactctcaactggagcaaatgaactttggtcccaaatatccatcttttcagtagcgttaattatgctctgtttccaactgcatttcctttccaattgaattaaagtgtggcctcgtttttagtcatttaaaattgttttctaagtaattgctgcctctattatggcacttcaattttgcactgtcttttgagattcaagaaaaatttctattcttttttttgcatccaattgtgcctgaacttttaaaatatgtaaatgctgccatgttccaaacccatcgtcagtgtgtgtgtttagagctgtgcaccctagaaacaacatattgtcccatgagcaggtgcctgagacacagacccctttgcattcacagagaggtcattggttatagagacttgaattaataagtgacattatgccagtttctgttctctcacaggtgataaacaatgctttttgtgcactacatactcttcagtgtagagctcttgttttatgggaaaaggctcaaatgccaaattgtgtttgatggattaatatgcccttttgccgatgcatactattactgatgtgactcggttttgtcgcagctttgctttgtttaatgaaacacacttgtaaacctcttttgcactttgaaaaagaatccagcgggatgctcgagcacctgtaaacaattttctcaacctatttgatgttcaaataaagaattaaactaaa

SEQ ID NO: 81 - DNA, 4550 bp, Homo sapiens
ccgcgcacacctccccgcgccgccgccgccaccgcccgcactccgccgcctctgcccgcaaccgctgagccatccatgggggtcgcgggccgcaaccgtcccggggcggcctgggcggtgctgctgctgctgctgctgctgccgccactgctgctgctggcgggggccgtcccgccgggtcggggccgtgccgcggggccgcaggaggatgtagatgagtgtgcccaagggctagatgactgccatgccgacgccctgtgtcagaacacacccacctcctacaagtgctcctgcaagcctggctaccaaggggaaggcaggcagtgtgaggacatcgatgaatgtggaaatgagctcaatggaggctgtgtccatgactgtttgaatattccaggcaattatcgttgcacttgttttgatggcttcatgttggctcatgacggtcataattgtcttgatgtggacgagtgcctggagaacaatggcggctgccagcatacctgtgtcaacgtcatggggagctatgagtgctgctgcaaggaggggtttttcctgagtgacaatcagcacacctgcattcaccgctcggaagagggcctgagctgcatgaataaggatcacggctgtagtcacatctgcaaggaggccccaaggggcagcgtcgcctgtgagtgcaggcctggttttgagctggccaagaaccagagagactgcatcttgacctgtaaccatgggaacggtgggtgccagcactcctgtgacgatacagccgatggcccagagtgcagctgccatccacagtacaagatgcacacagatgggaggagctgccttgagcgagaggacactgtcctggaggtgacagagagcaacaccacatcagtggtggatggggataaacgggtgaaacggcggctgctcatggaaacgtgtgctgtcaacaatggaggctgtgaccgcacctgtaaggatacttcgacaggtgtccactgcagttgtcctgttggattcactctccagttggatgggaagacatgtaaagatattgatgagtgccagacccgcaatggaggttgtgatcatttctgcaaaaacatcgtgggcagttttgactgcggctgcaagaaaggatttaaattattaacagatgagaagtcttgccaagatgtggatgagtgctctttggataggacctgtgaccacagctgcatcaaccaccctggcacatttgcttgtgcttgcaaccgagggtacaccctgtatggcttcacccactgtggagacaccaatgagtgcagcatcaacaacggaggctgtcagcaggtctgtgtgaacacagtgggcagctatgaatgccagtgccaccctgggtacaagctccactggaataaaaaagactgtgtggaagtgaaggggctcctgcccacaagtgtgtcaccccgtgtgtccctgcactgcggtaagagtggtggaggagacgggtgcttcctcagatgtcactctggcattcacctctcttcaggactgcaaggggcctactctgtcacctgtggctcttcctctcctctcaggaacaaacaacaaaaatcaaatgactctgcttttggggatgtcaccaccatcaggacaagtgtaacctttaagctaaatgaaggcaagtgtagtttgaaaaatgctgagctgtttcccgagggtctgcgaccagcactaccagagaagcacagctcagtaaaagagagcttccgctacgtaaaccttacatgcagctctggcaagcaagtcccaggagcccctggccgaccaagcacccctaaggaaatgtttatcactgttgagtttgagcttgaaactaaccaaaaggaggtgacagcttcttgtgacctgagctgcatcgtaaagcgaaccgagaagcggctccgtaaagccatccgcacgctcagaaaggccgtccacagggagcagtttcacctccagctctcaggcatgaacctcgacgtggctaaaaagcctcccagaacatctgaacgccaggcagagtcctgtggagtgggccagggtcatgcagaaaaccaatgtggtctgtgtcaacctggtgaatattctgcagatggctttgcaccttgccagctctgtgccctgggcacgttccagcctgaagctggtcgaacttcctgcttcccctgtggaggaggccttgccaccaaacatcagggagctacttcctttcaggactgtgaaaccagagttcaatgttcacctggacatttctacaacaccaccactcaccgatgtattcgttgcccagtgggaacataccagcctgaatttggaaaaaataattgtgtttcttgcccaggaaatactacgactgactttgatggctccacaaacataacccagtgtaaaaacagaagatgtggaggggagctgggagatttcactgggtacattgaatccccaaactacccaggcaattacccagccaacaccgagtgtacgtggaccatcaacccaccccccaagcgccgcatcctgatcgtggtccctgagatcttcctgcccatagaggacgactgtggggactatctggtgatgcggaaaacctcttcatccaattctgtgacaacatatgaaacctgccagacctacgaacgccccatcgccttcacctccaggtcaaagaagctgtggattcagttcaagtccaatgaagggaacagcgctagagggttccaggtcccatacgtgacatatgatgaggactaccaggaactcattgaagacatagttcgagatggcaggctctatgcatctgagaaccatcaggaaatacttaaggataagaaacttatcaaggctctgtttgatgtcctggcccatccccagaactatttcaagtacacagcccaggagtcccgagagatgtttccaagatcgttcatccgattgctacgttccaaagtgtccaggtttttgagaccttacaaatgactcagcccacgtgccactcaatacaaatgttctgctatagggttggtgggacagagctgtcttccttctgcatgtcagcacagtcgggtattgctgcctcccgtatcagtgactcattagagttcaatttttatagataatacagatattttggtaaattgaacttggtttttctttcccagcatcgtggatgtagactgagaatggctttgagtggcatcagcttctcactgctgtgggcggatgtcttggatagatcacgggctggctgagctggactttggtcagcctaggtgagactcacctgtccttctggggtcttactcctcctcaaggagtctgtagtggaaaggaggccacagaataagctgcttattctgaaacttcagcttcctctagcccggccctctctaagggagccctctgcactcgtgtgcaggctctgaccaggcagaacaggcaagaggggagggaaggagacccctgcaggctccctccacccaccttgagacctgggaggactcagtttctccacagccttctccagcctgtgtgatacaagtttgatcccaggaacttgagttctaagcagtgctcgtgaaaaaaaaaagcagaaagaattagaaataaataaaaactaagcacttctggagacataataatgtacatttattgccagccttcctcgttgcaagcttccaccctgcagcaaatgcactatgctgactctcgcaccttcagctgtgccctctgacactctgctggccattgcctgagggactggggagttcaggtgaaatgtaatttcctcagtggatgagaatcatcaattgtcatgaaaaggcgatttcaccaaccctgagtcggtattgccaagggttctactccccaagtgggcttcccatcacaagggatctgaggtccaggtgggtgtggtgaggcccagcctgtcatgtatgccttccttccccagtctcaaatgtgagagacggactctgctccgtggacatgagcagccccttgaagggtggtctcattctctaacagtaacagcactgccagaaacaccccctgaatgccacacgatcatctcactttgggtcaggccagcagggcctcacgatcatttcttgaacttgaattttcagtgttattgaatctttaaacatttaaatccccaagcaaaaatctcattacagtgaataaaaaggaatccaatcaaacaagccaccacttccctaatggatggactacctacaactatagtgttttgttatttcaataacaattctatgcacagccaattctccataccaaagtactaaaaaaatgtttaacaagcatttttgaagaaaacaaagagaacttcattatggttaaacttgcttttcatctcagtgttgctttttttaacctgttaataacattgattcttaaaaagtcctaatcaaacttctttatttggatgggccctaaatattcattttcagatttctcttcaaaagtttgaacatcatcattaaaaaaaaaatagcattaaaacaaaaaaaaaaaaaaaa

SEQ ID NO: 82 - DNA, 3509 bp, Homo sapiens
ggcgccctgaaacgttcggcgagccgactgcggctgcgcggggtattcgaatcggcggcggcttctagtttgcggttcaggtttggccgctgccggccagcgtcctctggccatggacaccccggaaaatgtccttcagatgcttgaagcccacatgcagagctacaagggcaatgaccctcttggtgaatgggaaagatacatacagtgggtagaagagaattttcctgagaataaagaatacttgataactttactagaacatttaatgaaggaatttttagataagaagaaataccacaatgacccaagattcatcagttattgtttaaaatttgctgagtacaacagtgacctccatcaattttttgagtttctgtacaaccatgggattggaaccctgtcatcccctctgtacattgcctgggcggggcatctggaagcccaaggagagctgcagcatgccagtgctgtccttcagagaggaattcaaaaccaggctgaacccagagagttcctgcaacaacaatacaggttatttcagacacgcctcactgaaacccatttgccagctcaagctagaacctcagaacctctgcataatgttcaggttttaaatcaaatgataacatcaaaatcaaatccaggaaataacatggcctgcatttctaagaatcagggttcagagctttctggagtgatatcttcagcttgtgataaagagtcaaatatggaacgaagagtgatcacgatttctaaatcagaatattctgtgcactcatctttggcatccaaagttgatgttgagcaggttgttatgtattgcaaggagaagcttattcgtggggaatcagaattttcctttgaagaattgagagcccagaaatacaatcaacggagaaagcatgagcaatgggtaaatgaagacagacattatatgaaaaggaaagaagcaaatgcttttgaagaacagctattaaaacagaaaatggatgaacttcataagaagttgcatcaggtggtggagacatcccatgaggatctgcccgcttcccaggaaaggtccgaggttaatccagcacgtatggggccaagtgtaggctcccagcaggaactgagagcgccatgtcttccagtaacctatcagcagacaccagtgaacatggaaaagaacccaagagaggcacctcctgttgttcctcctttggcaaatgctatttctgcagctttggtgtccccagccaccagccagagcattgctcctcctgttcctttgaaagcccagacagtaacagactccatgtttgcagtggccagcaaagatgctggatgtgtgaataagagtactcatgaattcaagccacagagtggagcagagatcaaagaagggtgtgaaacacataaggttgccaacacaagttcttttcacacaactccaaacacatcactgggaatggttcaggcaacgccatccaaagtgcagccatcacccaccgtgcacacaaaagaagcattaggtttcatcatgaatatgtttcaggctcctacacttcctgatatttctgatgacaaagatgaatggcaatctctagatcaaaatgaagatgcatttgaagcccagtttcaaaaaaatgtaaggtcatctggggcttggggagtcaataagatcatctcttctttgtcatctgcttttcatgtgtttgaagatggaaacaaagaaaattatggattaccacagcctaaaaataaacccacaggagccaggacctttggagaacgctctgtcagcagacttccttcaaaaccaaaggaggaagtgcctcatgctgaagagtttttggatgactcaactgtatggggtattcgctgcaacaaaaccctggcacccagtcctaagagcccaggagacttcacatctgctgcacaacttgcgtctacaccattccacaagcttccagtggagtcagtgcacattttagaagataaagaaaatgtggtagcaaaacagtgtacccaggcgactttggattcttgtgaggaaaacatggtggtgccttcaagggatggaaaattcagtccaattcaagagaaaagcccaaaacaggccttgtcgtctcacatgtattcagcatccttacttcgtctgagccagcctgctgcaggtggggtacttacctgtgaggcagagttgggcgttgaggcttgcagactcacagacactgacgctgccattgcagaagatccaccagatgctattgctgggctccaagcagaatggatgcagatgagttcacttgggactgttgatgctccaaacttcattgttgggaacccatgggatgataagctgattttcaaacttttatctgggctttctaaaccagtgagttcctatccaaatacttttgaatggcaatgtaaacttccagccatcaagcccaagactgaatttcaattgggttctaagctggtctatgtccatcaccttcttggagaaggagcctttgcccaggtgtacgaagctacccagggagatctgaatgatgctaaaaataaacagaaatttgttttaaaggtccaaaagcctgccaacccctgggaattctacattgggacccagttgatggaaagactaaagccatctatgcagcacatgtttatgaagttctattctgcccacttattccagaatggcagtgtattagtaggagagctctacagctatggaacattattaaatgccattaacctctataaaaatacccctgaaaaagtgatgcctcaaggtcttgtcatctcttttgctatgagaatgctttacatgattgagcaagtgcatgactgtgaaatcattcatggagacattaaaccagacaatttcatacttggaaacggatttttggaacaggatgatgaagatgatttatctgctggcttggcactgattgacctgggtcagagtatagatatgaaactttttccaaaaggaactatattcacagcaaagtgtgaaacatctggttttcagtgtgttgagatgctcagcaacaaaccatggaactaccagatcgattactttggggttgctgcaacagtatattgcatgctctttggcacttacatgaaagtgaaaaatgaaggaggagagtgtaagcctgaaggtctttttagaaggcttcctcatttggatatgtggaatgaattttttcatgttatgttgaatattccagattgtcatcatcttccatctttggatttgttaaggcaaaagctgaagaaagtatttcaacaacactatactaacaagattagggccctacgtaataggctaattgtactgctcttagaatgtaagcgttcacgaaaataaaatttggatatagacagtccttaaaaatcacactgtaaatatgaatctgctcactttaaacctgtttttttttcatttattgtttatgtaaatgtttgttaaaaataaatcccatggaatatttccatgtaaaaaaaaa

SEQ ID NO: 83 - DNA, 3637 bp, Homo sapiens
agtcctgggcgaagggggcggtggttccccgcggcgctgcgcgcggcggtaattagtgattgtcttccagcttcgcgaaggctaggggcgcggctgccgggtggctgcgcggcgctgcccccggaccgaggggcagccaacccaatgaaaccaccgcgtgttcgcgcctggtagagatttctcgaagacaccagtgggcccgttccgagccctctggaccgcccgtgtggaaccaaacctgcgcgcgtggccgggccgtgggacaacgaggccgcggagacgaaggcgcaatggcgaggaagttatctgtaatcttgatcctgacctttgccctctctgtcacaaatccccttcatgaactaaaagcagctgctttcccccagaccactgagaaaattagtccgaattgggaatctggcattaatgttgacttggcaatttccacacggcaatatcatctacaacagcttttctaccgctatggagaaaataattctttgtcagttgaagggttcagaaaattacttcaaaatataggcatagataagattaaaagaatccatatacaccatgaccacgaccatcactcagaccacgagcatcactcagaccatgagcgtcactcagaccatgagcatcactcagaccacgagcatcactctgaccatgatcatcactctcaccataatcatgctgcttctggtaaaaataagcgaaaagctctttgcccagaccatgactcagatagttcaggtaaagatcctagaaacagccaggggaaaggagctcaccgaccagaacatgccagtggtagaaggaatgtcaaggacagtgttagtgctagtgaagtgacctcaactgtgtacaacactgtctctgaaggaactcactttctagagacaatagagactccaagacctggaaaactcttccccaaagatgtaagcagctccactccacccagtgtcacatcaaagagccgggtgagccggctggctggtaggaaaacaaatgaatctgtgagtgagccccgaaaaggctttatgtattccagaaacacaaatgaaaatcctcaggagtgtttcaatgcatcaaagctactgacatctcatggcatgggcatccaggttccgctgaatgcaacagagttcaactatctctgtccagccatcatcaaccaaattgatgctagatcttgtctgattcatacaagtgaaaagaaggctgaaatccctccaaagacctattcattacaaatagcctgggttggtggttttatagccatttccatcatcagtttcctgtctctgctgggggttatcttagtgcctctcatgaatcgggtgtttttcaaatttctcctgagtttccttgtggcactggccgttgggactttgagtggtgatgcttttttacaccttcttccacattctcatgcaagtcaccaccatagtcatagccatgaagaaccagcaatggaaatgaaaagaggaccacttttcagtcatctgtcttctcaaaacatagaagaaagtgcctattttgattccacgtggaagggtctaacagctctaggaggcctgtatttcatgtttcttgttgaacatgtcctcacattgatcaaacaatttaaagataagaagaaaaagaatcagaagaaacctgaaaatgatgatgatgtggagattaagaagcagttgtccaagtatgaatctcaactttcaacaaatgaggagaaagtagatacagatgatcgaactgaaggctatttacgagcagactcacaagagccctcccactttgattctcagcagcctgcagtcttggaagaagaagaggtcatgatagctcatgctcatccacaggaagtctacaatgaatatgtacccagagggtgcaagaataaatgccattcacatttccacgatacactcggccagtcagacgatctcattcaccaccatcatgactaccatcatattctccatcatcaccaccaccaaaaccaccatcctcacagtcacagccagcgctactctcgggaggagctgaaagatgccggcgtcgccactctggcctggatggtgataatgggtgatggcctgcacaatttcagcgatggcctagcaattggtgctgcttttactgaaggcttatcaagtggtttaagtacttctgttgctgtgttctgtcatgagttgcctcatgaattaggtgactttgctgttctactaaaggctggcatgaccgttaagcaggctgtcctttataatgcattgtcagccatgctggcgtatcttggaatggcaacaggaattttcattggtcattatgctgaaaatgtttctatgtggatatttgcacttactgctggcttattcatgtatgttgctctggttgatatggtacctgaaatgctgcacaatgatgctagtgaccatggatgtagccgctgggggtatttctttttacagaatgctgggatgcttttgggttttggaattatgttacttatttccatatttgaacataaaatcgtgtttcgtataaatttctagttaaggtttaaatgctagagtagcttaaaaagttgtcatagtttcagtaggtcatagggagatgagtttgtatgctgtactatgcagcgtttaaagttagtgggttttgtgatttttgtattgaatattgctgtctgttacaaagtcagttaaaggtacgttttaatatttaagttattctatcttggagataaaatctgtatgtgcaattcaccggtattaccagtttattatgtaaacaagagatttggcatgacatgttctgtatgtttcagggaaaaatgtctttaatgctttttcaagaactaacacagttattcctatactggattttaggtctctgaagaactgctggtgtttaggaataagaatgtgcatgaagcctaaaataccaagaaagcttatactgaatttaagcaaagaaataaaggagaaaagagaagaatctgagaattggggaggcatagattcttataaaaatcacaaaatttgttgtaaattagaggggagaaatttagaattaagtataaaaaggcagaattagtatagagtacattcattaaacatttttgtcaggattatttcccgtaaaaacgtagtgagcacttttcatatactaatttagttgtacatttaactttgtataatacagaaatctaaatatatttaatgaattcaagcaatatatcacttgaccaagaaattggaatttcaaaatgttcgtgcgggtatataccagatgagtacagtgagtagttttatgtatcaccagactgggttattgccaagttatatatcaccaaaagctgtatgactggatgttctggttacctggtttacaaaattatcagagtagtaaaactttgatatatatgaggatattaaaactacactaagtatcatttgattcgattcagaaagtactttgatatctctcagtgcttcagtgctatcattgtgagcaattgtcttttatatacggtactgtagccatactaggcctgtctgtggcattctctagatgtttcttttttacacaataaattccttatatcagcttgaaaaaaaaaaaaaaaaaa

SEQ ID NO: 84 - DNA, 2906 bp, Homo sapiens
aagccaacctcgctcagcggacgactggccggatcccaacgcgctgccccttgcccagcctgcgagcgcgtggtacgaaggcgcgtctgcatccatgccccagcccggggagctggaggcgctcgcagtcagaggcgagtgatgctaggctgagcgcgtggcggcccgtgtcgtgccccgctgagccaagtgcggaagggcagcggcgcgctccgactctgctcgccgcacgcagggcggggcgcggctggggggcggggggcctggccgcccgctgggagctgcggacgagcaggcgcgctgaggacccgagggaggacacggttaaagcattgctatcaactgtgaacccagagagccctccttagccaacacgctaactccgaagcctcccttacgcccccgaaccaccgaaggcggcgacacctgattcagcgcacaaacacaggtcccttctgtcccggatacaattacgcggcagacacacactcagactcgcgcggggcagccaagagacgagctatgaagtcttacactccatatttcattctcctgtggagtgctgttgggatagcgaaggctgccaaaatcatcatcgtgccgccaattatgtttgaaagccatatgtacattttcaagacgctagcctcagccttgcacgagagaggccaccatacagtgttcctcctctctgaaggcagagacatcgccccatctaatcattacagcctccagcgctacccagggatctttaacagtaccacctcagatgctttcctacagtccaagatgcggaatattttctctgggagattgacagcaatcgaactgtttgacatactggatcactatactaagaactgtgacctgatggttggcaaccatgccctgatccagggtctgaagaaagaaaaatttgacctgctgctggtggaccctaatgatatgtgtggatttgtgatagctcatcttttaggggttaaatatgctgtattttcaactggcctttggtatcctgctgaagtgggtgctcctgctccattagcatacgtcccagagtttaactcactcctcacagaccgcatgaacttgctgcaaaggatgaaaaataccggtgtttacctcatttccagattaggggtcagctttctggttcttcccaaatatgaaaggataatgcagaagtacaacctgctgccggagaagtccatgtatgatttggttcatgggtccagcctgtggatgctgtgtactgacgtagcactggaattcccaagacccactctgcctaatgttgtttatgtaggaggaatcctaaccaaaccagccagcccactaccagaagatctccaaagatgggtaaatggtgctaatgaacatggctttgtcttggtgtcttttggagctggtgtcaagtatctgtcagaagacattgctaacaaactggcaggagctctggggagattgcctcaaaaagtgatttggaggttttctggacccaaaccaaagaatctaggaaacaacactaaactcatagaatggttaccacaaaatgacctgcttgggcattcaaagattaaagccttcctgagccatggtggtttgaacagtatttttgaaactatgtatcatggtgtgcctgtagtgggaattccactctttggagaccattatgatactatgaccagagtacaggcaaaaggcatggggatattgctagaatggaagacagttactgaaaaagagctctatgaagcactagtgaaggttatcaataatcccagctaccgtcagagggctcagaagctttcggaaattcacaaggatcaacctggtcaccctgtcaatcgaactatctattggatagattatattattcgtcacaatggagcccatcacctacgtgccgctgtccatcagatctccttttgtcagtattttttactggatattgcctttgtgcttttgcttggtgctgccttgttatactttctcttgtcttgggtgacaaaatttatctacagaaaaatcaaaagtctgtggtctagaaataagcatagcacagttaatggacattaccacaatggaatcctcaatggcaagtacaaaagaaatggccatattaaacatgaaaagaaagtgaaatgagccaacagcccaggtgatagaaataaattggttcactcattgaatttttattgctattatttagtctaacagctactaaaagtaaaacatcagtaaacaattctaacatgcccttatgagatctactaatgaaattctgtggaattaagatggctgtaaaaagcacaaacctaaaatgcagaaatgtattttattcaaatactgatgtagagagttttggcactgaaccttttagaagccttaattatttaaatcaattcagtgactgtgtcagaccttagttttaaatcttgatatgtgcgtgtcccggatcaggaatggtttcatttttcttaataatgtgtgtgtgtgtatgtgtgtgtgtgtgtgtgtgtgtttgtgtgtgtgtgtgtgtgtcctaattaagagaatttttactggctgcttgttacatttgttgagggtacaacacactcaagaataaagtaaaaggatagtcaggatccagatgtttcttttctagcatttaatgtgtgtgaactcagaacactaccatgaaagaacacttccccccaaaactggatgcagaggaagaaaaaaaaaaaagaaatggcacagttttttgtatttttttttttagttattttttgttgttgttgtttgtattgtttttcttttctgatagagtatggccacttctgggggaaaaacatgtaattaagtaaatgtatacattggttttcacgttttacttttgttttcccactaccaataatttt

SEQ ID NO: 85 - DNA, 2617 bp, Homo sapiens
tcttccgggcgccgcagcttcctgccaagcaccgcgcagccgcctccgccgcaggatcccccggtgcaggcctccgtgctggtgcggatcctggagctcagccgcgcgcgccctgcccgatcctgtgccgacccaccgcactatgcgcgccgtgccgctgcccgccccgctcctgccgctgctgctgctcgcgctcctggccgctcccaccgcccgcgccagcagagccgagtccgtctccgcgccgcggcccgaacccgagcgcgagtcgcggccaccgcccggcccggggcccgggaacaccacccggtttgggtctggggcggcgggcggcagcggcagctccaacagcagcggcgacgccttggtgacccgcatttccatcctcctccgcgacctacccaccctcaaggcagccgtgatcgtggcgttcgcctttaccaccctcctcatcgcctgcctgctgctgcgcgtcttcaggtcgggaaagaggttaaagaagacacgcaagtatgatatcatcaccactccagcagagcgagtggaaatggcgccactaaatgaagaggatgatgaagatgaggactccacagtattcgacatcaaatacaggtaaaacctgtttcccagcctggtggcatcctgtggaaagttggtcagctgcaacctggggtgtgaaggactggacctggaagccctcttgcgtcggaggtgttgaaaccaaaacgaacgttatgtataaaaccccagctccatcgtgcgtgtcaggcatctgctcagactgtcactggcaagctcgtttccacgtcaccacaatggagttgcttctgccaccctttgggcatccctttaaagtgccccctacttctactccccatgtaagaggctttgtgccttgctaaggagcaaagggtagaaacatgttgattttaaagaagtttttttaagacaattgttgacaatagtaaaagagatcaggaggatcaagaatctaaaacaagcctgaaggatgtccaactgtgtatttagaatttccgacattcttctctactggatctacacattggaccccatctgatcctttgctgcttttttggcttggtcaggtcctggcctcattttggcgttacctgtgtcagagttcaaggtggatgtgcttagagctggtcagccccttccagacctggacacgtctgtggctccttttctttcttcctttttttttttaaaaaaaaaaaaggttcagcagaaatcagcgtggctagttcacaaagaatttccagtatcagggaaaaactgtgcgtgtgtgtgtgtgtgtgtgtgcacgtgtgtgcgtgtgcacgtgtgtgatacctataaaacagtttctccttctctgaagggaaaggaaagtgctaggcagcctgtgattagcaacattctttgtgcttttttgttgttcctctgctctgtcacagttctacgttgtttgccttagaaatgtaatttttaaaaaccattttaaaaatgaacggtgatttggctggctggaaaaaatcacactgtcaggggactatatttgaagtcagtctagacggggctggactaggaacccacctggacccaggagaccccacaggacccaggaggtccctgccggaaggcagaggttcaggtgagagtggctcacctctgagctggtgaagtgaggacttgcctgtgacatgacccagggatctgctgctggcttctggagacagggccttgggctgacttctcaggttgattgaggcctcctgactagcggtgttcccaggctagaggtgattggctgcaacaaagatgcttctattagtctattagcagtgccttcgggaccctgggattttgctctctctagaaaggtgttttttatttttttattttttatctcccccttttttcctggctttgctccagggtttgtgtatttgcctgtttattgtcctgctctttttttttttggatgaaaactccagcctttcctgactcacctccatcttcggttcttcagttttctgagaagagttgggatatgtgggaaggggcatgggagctcggcagcctccgcctgccaggaaggcagtttcgcctctgcaggaaagagcagagcccgtgggaagccctgggtgagggtggcgcagccggcccagcacgcatggtattgccagccacggggggcctgcgtgtagtctctgctccctgcatttcaccttctttgttgactttccttccctgttttcccccatctgtttgccagaggggtgggactggcaacagaacagccgtggctgctttatctctcctctccacggtgtactcaggcctgagtggtgactcacgggagcctggccacctcgcagctgttcgccccctcaacctttgaactggaactgctggctcacacagggttttcgacaactgcagctgaatctcatggaaaagctggattcctctgccttacgcagaaacacccgggctccatctgccaggtgcttgccactggtcctggcagaaatggcggctgctgaaagtgaccttccaaatccttggtggcacttcagcgccacaggctctccaataaaaaccctttacacac

SEQ ID NO: 86 - DNA, 2063 bp, Homo sapiens
  misc_feature (1)..(1): n is a, c, g, t or u
nttcgaacggctttggcgggccgaggaaggacctggtgttttgatgaccgctgtcctgtctagcagatacttgcacggtttacagaaattcggtccctgggtcgtgtcaggaaactggaaaaaaggtcataatcatgaagcgcagttcagtttccagcggtggtgctggccgcctctccatgcaggagttaagatcccaggatgtaaataaacaaggcctctatacccctcaaaccaaagagaaaccaacctttggaaagttgagtataaacaaaccgacatctgaaagaaaagtctcgctatttggcaaaagaactagtggacatggatcccggaatagtcaacttggtatattttccagttctgagaaaatcaaggacccgagaccacttaatgacaaagcattcattcagcagtgtattcgacaactctgtgagtttcttacagaaaatggttatgcacataatgtgtccatgaaatctctacaagctccctctgttaaagacttcctgaagatcttcacgtttctttatggcttcctgtgcccctcatacgaacttcctgacacaaagtttgaagaagaggttccaagaatctttaaagaccttgggtatccttttgcactatccaaaagctccatgtacacagtgggggctcctcatacatggcctcacattgtggcagccttagtttggctaatagactgcatcaagatacatactgccatgaaagaaagctcacctttatttgatgatgggcagccttggggagaagaaactgaagatggaattatgcataataagttgtttttggactacaccataaaatgctatgagagttttatgagtggtgccgacagctttgatgagatgaatgcagagctgcagtcaaaactgaaggatttatttaatgtggatgcttttaagctggaatcattagaagcaaaaaacagagcattgaatgaacagattgcaagattggaacaagaaagagaaaaagaaccgaatcgtctagagtcgttgagaaaactgaaggcttccttacaaggagatgttcaaaagtatcaggcatacatgagcaatttggagtctcattcagccattcttgaccagaaattaaatggtctcaatgaggaaattgctagagtagaactagaatgtgaaacaataaaacaggagaacactcgactacagaatatcattgacaaccagaagtactcagttgcagacattgagcgaataaatcatgaaagaaatgaattgcagcagactattaataaattaaccaaggacctggaagctgaacaacagaagttgtggaatgaggagttaaaatatgccagaggcaaagaagcgattgaaacacaattagcagagtatcacaaattggctagaaaattaaaacttattcctaaaggtgctgagaattccaaaggttatgactttgaaattaagtttaatcccgaggctggtgccaactgccttgtcaaatacagggctcaagtttatgtacctcttaaggaactcctgaatgaaactgaagaagaaattaataaagccctaaataaaaaaatgggtttggaggatactttagaacaattgaatgcaatgataacagaaagcaagagaagtgtgagaactctgaaagaagaagttcaaaagctggatgatctttaccaacaaaaaattaaggaagcagaggaagaggatgaaaaatgtgccagtgagcttgagtccttggagaaacacaagcacctgctagaaagtactgttaaccaggggctcagtgaagctatgaatgaattagatgctgttcagcgggaataccaactagttgtgcaaaccacgactgaagaaagacgaaaagtgggaaataacttgcaacgtctgttagagatggttgctacacatgttgggtctgtagagaaacatcttgaggagcagattgctaaagttgatagagaatatgaagaatgcatgtcagaagatctctcggaaaatattaaagagattagagataagtatgagaagaaagctactctaattaagtcttctgaagaatga

SEQ ID NO: 87 - DNA, 4917 bp, Homo sapiens
gagggccagcgcaagcagcggcaacaggagcgccaggaggtgaggcgggttcgccaggagtggggccagcgcccgggctgccagcctagcaggggcgtcttggcggagccccctcgccggctcccagagaggctgggaagaactgggaggggtgtccccaatgcggggcgcccaagcgtggcagcacgggctgggagcggggagccagcggggtgcggcgccggagtgcggggagaaccaccaggcgccggaattggggagcacgtggagggggcagcggctccagccccagaccgccgcgctctgtcactttgcattaagaaagcttccggggaatgcacacggcctggccgccgccttcgtgcagcccgccctgcaggtgcaggaagaaaagaataatcgcacccgtttctcaggtgcttacttcaccatgtccgatccggacatgaggctctgcctgcagtcagcaacttggaatattcagacttcagaccagcatcacagattataaccctccgtaaatcatctgcatcccagctcccatcaaaagccagcctgaaggacccatggacacgtgactccagtgttctcaacaacatcttaagatcaagttggtttgcacaacatttgcatctacttgggacaaagcaagaacaataagggcaaaaaagtgaaaaaaaaaaaagatccctgagtaattgcaaatgctgggacagtttaccactccagggtgaagagtccataccaacatgtctgcctactacaggaataactggtctgaggaagacccagattaccctgactattcagggtctcagaaccgtacgcaggggtatttgaaaactcaaggttatccagatgttccaggtcctctgaacaatccagactaccccggcaccaggagcaatccatactctgtagcctccagaacacgtccagactatcctgggtctctggcagaaccaaattatcctagatctctgagtaatccagactattctggcaccagaagcaatgcatactctgcagcctctagaacaagcccagaccatcctacctctctaccagagccagattatagtgaatttcagagtcatccctaccaccgagcatcatccagacaaccagactaccctggatctcaacgaaatcctgattttgcaggctccagcagcagtggaaactatgcaggctccagaacacatccagatcattttggctccttagaaccggactaccctggagctcagagcaactctgatcatcctggacccagagccaatttgaaccatccaggatccagaaagaatctggaacatacaagttttagaatcaatccatacgcagactctctgggaaagcctgattatccaggcgctgacattcaacctaactctccacccttttttggggagccagactatcccagtgctgaggacaatcagaacttgccaagcacttggagagaacctgattattcagatgctgagaatggtcatgattatggctcttctgagaccccaaagatgaccaggggggtgctcagcagaacatcttcaatccagccctcatttcgtcacaggagtgatgaccccgtgggcagtctttggggagagaatgattaccctgaaggcattgaaatggcatccatggagatggcaaactcatatggccactctctgccaggtgctcctggaagtggctatgtgaaccctgcttatgtaggtgaaagtggtcctgtccatgcttatggaaacccaccattgtctgaatgtgattggcacaagtcaccccaaggacagaagttaatcgcatcccttatacccatgacatccagagacagaattaaagccatcaggaaccagccaaggaccatggaagagaaaaggaaccttaggaaaatagttgacaaagaaaaaagcaaacagacccatcgtatccttcagctcaattgctgtattcagtgtctgaactccatttcccgggcttatcggagatccaagaacagcctgtcggaaattctgaattccatcagcctgtggcagaagacgctgaagatcattggaggcaagtttggaaccagcgtcctctcctatttcaactttctgagatggcttttgaagttcaacattttctcattcatcctgaacttcagcttcatcataatccctcagtttaccgtggccaaaaagaacaccctccagttcactgggctggagtttttcactggggtgggttattttagggacacagtgatgtactatggcttttacaccaattccaccatccagcacgggaacagcggggcatcctacaacatgcagctggcctacatcttcacaatcggagcatgcttgaccacctgcttcttcagtttgctgttcagcatggccaagtatttccggaacaacttcattaatccccacatttactccggagggatcaccaagctgatcttttgctgggacttcactgtcactcatgaaaaagctgtgaagctaaaacagaagaatcttagcactgagataagggagaacctgtcagagctccgtcaggagaattccaagttgacgttcaatcagctgctgacccgcttctctgcctacatggtagcctgggttgtctctacaggagtggccatagcctgctgtgcagccgtttattacctggctgagtacaacttagagttcctgaagacacacagtaaccctggggcggtgctgttactgcctttcgttgtgtcctgcattaatctggccgtgccatgcatctactccatgttcaggcttgtggagaggtacgagatgccacggcacgaagtctacgttctcctgatccgaaacatctttttgaaaatatcaatcattggcattctttgttactattggctcaacaccgtggccctgtctggtgaagagtgttgggaaaccctcattggccaggacatctaccggctccttctgatggattttgtgttctctttagtcaattccttcctgggggagtttctgaggagaatcattgggatgcaactgatcacaagtcttggccttcaggagtttgacattgccaggaacgttctagaactgatctatgcacaaactctggtgtggattggcatcttcttctgccccctgctgccctttatccaaatgattatgcttttcatcatgttctactccaaaaatatcagcctgatgatgaatttccagcctccgagcaaagcctggcgggcctcacagatgatgactttcttcatcttcttgctctttttcccatccttcaccggggtcttgtgcaccctggccatcaccatctggagattgaagccttcagctgactgtggcccttttcgaggtctgcctctcttcattcactccatctacagctggatcgacaccctaagtacacggcctggctacctgtgggttgtttggatctatcggaacctcattggaagtgtgcacttctttttcatcctcaccctcattgtgctaatcatcacctatctttactggcagatcacagagggaaggaagattatgataaggctgctccatgagcagatcattaatgagggcaaagataaaatgttcctgatagaaaaattgatcaagctgcaggatatggagaagaaagcaaaccccagctcacttgttctggaaaggagagaggtggagcaacaaggctttttgcatttgggggaacatgatggcagtcttgacttgcgatctagaagatcagttcaagaaggtaatccaagggcctgatgactcttttggtaaccagacaccaatcaaataaggggaggagacgaaaatggaatgatttcttccatgccacctgtgcctttaggaactgcccagaagaaaatccaaggctttagccaggagcggaaactgactaccatgtaattatcaaagtaaaattgggcattccatgctatttttaatacctggattgctgatttttcaagacaaaatacttggggttttccaataaagattgttgtaatattgaaatgagcctacaaaaacctaggaagagataactagggaataatgtatattatcttcaagaagtgtgtgcaggaatgattggttcttagaaatctctcctgccagacttcccagacctggcaaaggtttagaaactgttgctaagaaaagtggtccatcctgaataaacatgtaatactccagcagggatatgaagcctctgaattgtagaacctgcatttatttgtgactttgaactaaagacatcccccatgtcccaaaggtggaatacaaccagaggtctcatctctgaactttcttgcgtactgattacatgagtctttggagtcggggatggaggaggttctgcccctgtgaggtgttatacatgaccatcaaagtcctacgtcaagctagctttgcagtggcagtaccgtagccaatgagatttatccgagacgcgattattgctaattggaaattttcccaataccccaccgtgatgacttgaaatataatcagcgctggcaatttttgacagtctctacggagactgaataagaaaaaagaaaagaaaagaaattagctgggtgcgatggcttatgcctgtaatcccggcactttgggaggctgaggcaagcggatcacttaatgtcaggagttcaagaccagcctggccaacatggtgaaaccccgtctctactaaaaataaaaaaactagctgggcgtggtggtacatgcctataatcccagctactcgggaggctgaggcaggagaattgcttgaacctgggaggcagaggttgcagtgaggcgagattgtaccactgcattccagcctgggcaacagtgagactctgcctcaaaaaaataaataaataaataaataaagtaaattaaaagtcttattcaaaccaaa

SEQ ID NO: 88 - DNA, 4816 bp, Homo sapiens
gttcccggatttttgtgggcgcctgccccgcccctcgtccccctgctgtgtccatatatcgaggcgatagggttaagggaaggcggacgcctgatgggttaatgagcaaactgaagtgttttccatgatcttttttgagtcgcaattgaagtaccacctcccgagggtgattgcttccccatgcggggtagaacctttgctgtcctgttcaccactctacctccagcacagaatttggcttatgcctactcaatgtgaagatgatgaggatgaaaacctttgtgatgatccacttccacttaatgaatggtggcaaagcaaagctatattcaagaccacatgcaaagctactccctgagcaaagagtcacagataaaacgggggcaccagtagaatggccaggacaaacgcagtgcagcacagagactcagaccctggcagccatgcctgcgcaggcagtgatgagagtgacatgtactgttgtggacatgcacaaaagtgagtgtgcaccggcacagacatgaagctgcggctccctgccagtcccgagacccacctggacatgctccgccacctctaccagggctgccaggtggtgcagggaaacctggaactcacctacctgcccaccaatgccagcctgtccttcctgcaggatatccaggaggtgcagggctacgtgctcatcgctcacaaccaagtgaggcaggtcccactgcagaggctgcggattgtgcgaggcacccagctctttgaggacaactatgccctggccgtgctagacaatggagacccgctgaacaataccacccctgtcacaggggcctccccaggaggcctgcgggagctgcagcttcgaagcctcacagagatcttgaaaggaggggtcttgatccagcggaacccccagctctgctaccaggacacgattttgtggaaggacatcttccacaagaacaaccagctggctctcacactgatagacaccaaccgctctcgggcctgccacccctgttctccgatgtgtaagggctcccgctgctggggagagagttctgaggattgtcagagcctgacgcgcactgtctgtgccggtggctgtgcccgctgcaaggggccactgcccactgactgctgccatgagcagtgtgctgccggctgcacgggccccaagcactctgactgcctggcctgcctccacttcaaccacagtggcatctgtgagctgcactgcccagccctggtcacctacaacacagacacgtttgagtccatgcccaatcccgagggccggtatacattcggcgccagctgtgtgactgcctgtccctacaactacctttctacggacgtgggatcctgcaccctcgtctgccccctgcacaaccaagaggtgacagcagaggatggaacacagcggtgtgagaagtgcagcaagccctgtgcccgagtgtgctatggtctgggcatggagcacttgcgagaggtgagggcagttaccagtgccaatatccaggagtttgctggctgcaagaagatctttgggagcctggcatttctgccggagagctttgatggggacccagcctccaacactgccccgctccagccagagcagctccaagtgtttgagactctggaagagatcacaggttacctatacatctcagcatggccggacagcctgcctgacctcagcgtcttccagaacctgcaagtaatccggggacgaattctgcacaatggcgcctactcgctgaccctgcaagggctgggcatcagctggctggggctgcgctcactgagggaactgggcagtggactggccctcatccaccataacacccacctctgcttcgtgcacacggtgccctgggaccagctctttcggaacccgcaccaagctctgctccacactgccaaccggccagaggacgagtgtgtgggcgagggcctggcctgccaccagctgtgcgcccgagggcactgctggggtccagggcccacccagtgtgtcaactgcagccagttccttcggggccaggagtgcgtggaggaatgccgagtactgcaggggctccccagggagtatgtgaatgccaggcactgtttgccgtgccaccctgagtgtcagccccagaatggctcagtgacctgttttggaccggaggctgaccagtgtgtggcctgtgcccactataaggaccctcccttctgcgtggcccgctgccccagcggtgtgaaacctgacctctcctacatgcccatctggaagtttccagatgaggagggcgcatgccagccttgccccatcaactgcacccactcctgtgtggacctggatgacaagggctgccccgccgagcagagagccagccctctgacgtccatcatctctgcggtggttggcattctgctggtcgtggtcttgggggtggtctttgggatcctcatcaagcgacggcagcagaagatccggaagtacacgatgcggagactgctgcaggaaacggagctggtggagccgctgacacctagcggagcgatgcccaaccaggcgcagatgcggatcctgaaagagacggagctgaggaaggtgaaggtgcttggatctggcgcttttggcacagtctacaagggcatctggatccctgatggggagaatgtgaaaattccagtggccatcaaagtgttgagggaaaacacatcccccaaagccaacaaagaaatcttagacgaagcatacgtgatggctggtgtgggctccccatatgtctcccgccttctgggcatctgcctgacatccacggtgcagctggtgacacagcttatgccctatggctgcctcttagaccatgtccgggaaaaccgcggacgcctgggctcccaggacctgctgaactggtgtatgcagattgccaaggggatgagctacctggaggatgtgcggctcgtacacagggacttggccgctcggaacgtgctggtcaagagtcccaaccatgtcaaaattacagacttcgggctggctcggctgctggacattgacgagacagagtaccatgcagatgggggcaaggtgcccatcaagtggatggcgctggagtccattctccgccggcggttcacccaccagagtgatgtgtggagttatggtgtgactgtgtgggagctgatgacttttggggccaaaccttacgatgggatcccagcccgggagatccctgacctgctggaaaagggggagcggctgccccagccccccatctgcaccattgatgtctacatgatcatggtcaaatgttggatgattgactctgaatgtcggccaagattccgggagttggtgtctgaattctcccgcatggccagggacccccagcgctttgtggtcatccagaatgaggacttgggcccagccagtcccttggacagcaccttctaccgctcactgctggaggacgatgacatgggggacctggtggatgctgaggagtatctggtaccccagcagggcttcttctgtccagaccctgccccgggcgctgggggcatggtccaccacaggcaccgcagctcatctaccaggagtggcggtggggacctgacactagggctggagccctctgaagaggaggcccccaggtctccactggcaccctccgaaggggctggctccgatgtatttgatggtgacctgggaatgggggcagccaaggggctgcaaagcctccccacacatgaccccagccctctacagcggtacagtgaggaccccacagtacccctgccctctgagactgatggctacgttgcccccctgacctgcagcccccagcctgaatatgtgaaccagccagatgttcggccccagcccccttcgccccgagagggccctctgcctgctgcccgacctgctggtgccactctggaaaggcccaagactctctccccagggaagaatggggtcgtcaaagacgtttttgcctttgggggtgccgtggagaaccccgagtacttgacaccccagggaggagctgcccctcagccccaccctcctcctgccttcagcccagccttcgacaacctctattactgggaccaggacccaccagagcggggggctccacccagcaccttcaaagggacacctacggcagagaacccagagtacctgggtctggacgtgccagtgtgaaccagaaggccaagtccgcagaagccctgatgtgtcctcagggagcagggaaggcctgacttctgctggcatcaagaggtgggagggccctccgaccacttccaggggaacctgccatgccaggaacctgtcctaaggaaccttccttcctgcttgagttcccagatggctggaaggggtccagcctcgttggaagaggaacagcactggggagtctttgtggattctgaggccctgcccaatgagactctagggtccagtggatgccacagcccagcttggccctttccttccagatcctgggtactgaaagccttagggaagctggcctgagaggggaagcggccctaagggagtgtctaagaacaaaagcgacccattcagagactgtccctgaaacctagtactgccccccatgaggaaggaacagcaatggtgtcagtatccaggctttgtacagagtgcttttctgtttagtttttactttttttgttttgtttttttaaagatgaaataaagacccagggggagaatgggtgttgtatggggaggcaagtgtggggggtccttctccacacccactttgtccatttgcaaatatattttggaaaacagcta

SEQ ID NO: 89 - DNA, 3992 bp, Homo sapiens
ataaaagctgcccggggaagccaggagagcgaagggcggacgtactcgccacggcacccaggctgcgcgcacgcggtcccggtgtgcagctggagagcgagcggccaccgggagcccccggcacagcccgcgcccgccccgcaggagcccgcgaagatgccccggcgcagcctgcacgcggcggccgtgctcctgctggtgatcttaaaggaacagccttccagcccggccccagtgaacggttccaagtggacttattttggtcctgatggggagaatagctggtccaagaagtacccgtcgtgtgggggcctgctgcagtcccccatagacctgcacagtgacatcctccagtatgacgccagcctcacgcccctcgagttccaaggctacaatctgtctgccaacaagcagtttctcctgaccaacaatggccattcagtgaagctgaacctgccctcggacatgcacatccagggcctccagtctcgctacagtgccacgcagctgcacctgcactgggggaacccgaatgacccgcacggctctgagcacaccgtcagcggacagcacttcgccgccgagctgcacattgtccattataactcagacctttatcctgacgccagcactgccagcaacaagtcagaaggcctcgctgtcctggctgttctcattgagatgggctccttcaatccgtcctatgacaagatcttcagtcaccttcaacatgtaaagtacaaaggccaggaagcattcgtcccgggattcaacattgaagagctgcttccggagaggaccgctgaatattaccgctaccgggggtccctgaccacacccccttgcaaccccactgtgctctggacagttttccgaaaccccgtgcaaatttcccaggagcagctgctggctttggagacagccctgtactgcacacacatggacgacccttcccccagagaaatgatcaacaacttccggcaggtccagaagttcgatgagaggctggtatacacctccttctcccaagtgcaagtctgtactgcggcaggactgagtctgggcatcatcctctcactggccctggctggcattcttggcatctgtattgtggtggtggtgtccatttggcttttcagaaggaagagtatcaaaaaaggtgataacaagggagtcatttacaagccagccaccaagatggagactgaggcccacgcttgaggtccccggagctcccgggcacatccaggaaggaccttgctttggaccctacacacttcggctctctggacacttgcgacacctcaaggtgttctctgtagctcaatctgcaaacatgccaggcctcagggatcctctgctgggtgcctccttgccttgggaccatggccaccccagagccatccgatcgatggatgggatgcactctcagaccaagcagcaggaattcaaagctgcttgctgtaactgtgtgagattgtgaagtggtctgaattctggaatcacaaaccaagccatgctggtgggccattaatggttggaaaacactttcatccggggctttgccagagcgtgctttcaagtgtcctggaaattctgctgcttctccaagctttcagacaagaatgtgcactctctgcttaggttttgcttgggaaactcaacttctttcctctggagacggggcatctccctctgatttccttctgctatgacaaaacctttaatctgcaccttacaactcggggacaaatggggacaggaaggatcaagttgtagagagaaaaagaaaacaagagatatacattgtgatatattagggacactttcacagtcctgtcctctggatcacagacactgcacagaccttagggaatggcaggttcaagttccacttcttggtggggatgagaagggagagagagctagagggacaaagagaatgagaagacatggatgatctgggagagtctcactttggaatcagaattggaatcacattctgtttatcaagccataatgtaaggacagaataatacaatattaagtccaaatccaacctcctgtcagtggagcagttatgttttatactctacagattttacaaataatgaggctgttccttgaaaatgtgttgttgctgtgtcctggaggagacatgagttccgagatgacccaatctgcctttgaatctggaggaaataggcagaaacaaaatgactgtagaacttattctctgtaggccaaatttcatttcagccacttctgcaggatccctactgccaacctggaatggagacttttatctacttctctctctctgaagatgtcaaatcgtggtttagatcaaatatatttcaagctataaaagcaggaggttatctgtgcagggggctggcatcatgtatttaggggcaagtaataatggaatgctactaagatactccatattcttccccgaatcacacagacagtttctgacaggcgcaactcctccattttcctcccgcaggtgagaaccctgtggagatgagtcagtgccatgactgagaaggaaccgacccctagttgagagcaccttgcagttccccgagaactttctgattcacagtctcattttgacagcatgaaatgtcctcttgaagcatagctttttaaatatctttttccttctactcctccctctgactctaagaattctctcttctggaatcgcttgaacccaggaggcggaggttgcagtaagccaaggtcatgccactgcactctagcctgggtgacagagcgagactccatctcaaaaaaaaaaaaaaaaaaattattctgtaccatcacaacttttcacaacgatggcaagccttatgtcttgggagcctgttttgctaggcaaagttacaagtgacctaatgggagctcaaatgtgtgtgtgtctctctgtgtgtttgtgtgtgtgtgtgcactcaagacctctaacagcctcgaagcctggggtggcatcccggccttgccattagcatgcctcatgcatcatcagatgacaaggacaaccctcatgacgaagcaacatgaattagggggcctcttggccttggtccaaaattgtcaatcagaaatgaacataaaggactccagagcagtgggactgtctgtcaaaagactctgtatatcttttgtggatgagttttgtgagagaacagagagaccattgtacctggcacaagggctgttcatgaaaagggagacttactgggaggtgcaagacagtggcatttctcctctcctcttgctgctcagcacagccctggattgcagccccgaggctgagaccagacaaagcccgggaggcagaaagatgctccaagaaccaacactatcaatgtctttgcaaatcctcacaggattcctgtgggtccagctttggaactgggaaacctttcttcggatccgcactcattccactgatgccagctgcccctgaaggatgccagtactgtggtgtgtgagtctcagcagccgcccacacgctcctaactctgctgcatggcagatgcctaggtggaaatagcaaaaacaaggcccaggctggggccagggccagaggggaaggccctggattctcactcatgtgagatcttgaatctctttctttgttctgtttgtttagttagtatcatctggtaaaatagttaaaaaacaacaaaaaactctgtatctgtttctagcatgtgctgcattgactctattaatcacatttcaaattcaccctacattcctctcctcttcactagcctctctgaaggtgtcctggccagccctggagaagcactggtgtctgcagcacccctcagttcctgtgcctcagcccacaggccactgtgataatggtctgtttagcacttctgtatttattgtaagaatgattataatgaagatacacactgtaactacaagaaattataaatgtttttcacatcaaaaaaaaaaaaaaaaaa

SEQ ID NO: 90 - DNA, 3065 bp, Homo sapiens
ctatttgagtttgtggcgcgcgaggccctgcagtccgggttggcgcttgggtactggctgggtccgatgctgggtacgctgcgcgccatggagggcgaggacgtggaagacgaccagctgctgcagaagctcagggccagtcgccgccgcttccagaggcgcatgcagcggctgatagagaagtacaaccagcccttcgaggacaccccggtggtgcaaatggccacgctgacctacgagacgccacagggattgagaatttggggtggaagactaataaaggaaagaaacgaaggagagatccaggactcctccatgaagcccgcggacaggacagatggctccgtgcaagctgcagcctggggtcctgagcttccctcgcaccgcacagtcctgggagccgattcaaaaagcggtgaggtcgatgccacgtcagaccaggaagagtcagttgcttgggccttagcacctgcagtgcctcaaagccctttgaaaaatgaattaagaaggaaatacttgacccaagtggatatactgctacaaggtgcagagtattttgagtgtgcaggtaacagagctggaagggatgtacgtgtgactccgctgccttcactggcctcacctgccgtgcctgcccccggatactgcagtcgtatctccagaaagagtcctggtgacccagcgaaaccagcttcatctcccagagaatgggatcctttgcatccttcctccacagacatggccttagtacctagaaatgacagcctctccctacaagagaccagtagcagcagcttcttaagcagccagccctttgaagatgatgacatttgcaatgtgaccatcagtgacctgtacgcagggatgctgcactccatgagccggctgttgagcacaaagccatcaagcatcatctccaccaaaacgttcatcatgcaaaactggaactccaggaggaggcacagatataagagcaggatgaacaaaacatattgcaaaggagccagacgttctcagaggagctccaaggagaacttcataccctgctctgagcctgtgaaagggacaggggcattaagagattgcaagaacgtattagatgtttcttgccgtaagacaggtttaaaattggaaaaagcttttcttgaagtcaacagaccccaaatccataagttagatccaagttggaaggagcgcaaagtgacaccctcgaagtattcttccttgatttacttcgactccagtgcaacatataatcttgatgaggaaaatagatttaggacattaaaatggttaatttctcctgtaaaaatagtttccagaccaacaatacgacagggccatggagagaaccgtcagagggagattgaaatccgatttgatcagcttcatcgggaatattgcctgagtcccaggaaccagcctcgccggatgtgcctcccggactcctgggccatgaacatgtacagagggggtcctgcgagtcctggtggccttcagggcttagaaacccgcaggctgagtttaccttccagcaaagcaaaagcaaaaagtttaagtgaggcttttgaaaacctaggcaaaagatctctggaagcaggtaggtgcctgcccaagagcgattcatcttcatcacttccaaagaccaaccccacacacagcgcaactcgcccgcagcagacatctgaccttcacgttcagggaaatagttctggaatatttagaaagtcagtgtcacccagcaaaactctttcagtcccagataaagaagtgccaggccacggaaggaatcgttacgatgaaattaaagaagaatttgacaagcttcatcaaaagtattgcctcaaatctcctgggcagatgacagtgcctttatgtattggagtgtctacagataaagcaagtatggaagttcgatatcaaacagaaggcttcttaggaaaattaaatccagaccctcacttccagggtttccagaagttgccatcatcacccctggggtgcagaaaaagtctactgggctcaactgcaattgaggctccttcatctacatgtgttgctcgtgccatcacgagggatggcacgagggaccatcagttccctgcaaaaagacccaggctatcagaaccccagggctccggacgccagggcaattccctgggtgcctcagatggggtggacaacaccgtcagaccgggagaccagggcagctcttcacagcccaactcagaagagagaggagagaacacgtcttacaggatggaagagaaaagtgatttcatgctagaaaaattggaaactaaaagtgtgtagctaggttatttcggagtgttatttatcttcccacttgctctctgtttgtatttttgttttgtttttgattcttgagactgtgaggacttggttgacttctctgcccttaaagtaaatattagtgaaattggttccatcagagataacctcgagttcttggtgtagaaattatgtgaataaagttgctcaattagaatttttagggttctctttgataggcctgtttttctgatgtgtgtgttttttttgggggggggttatttgtttgtttgtttgtttgtttgtttgtttttgagacagtctctctctatcgcccaggctggagtgcggtggcacaatcttggctcactgcaacttccgcctcccgggttcaagcgattcttctgcctcagcctcccgagtagctgggattacaggcgcgcgccaccacgcctggctaatttttgtagttttagtagagacggggtttcaccatattgaccaggctggtctcgagctcctggcctcgtgatccatctgcctcggcctcccaaagtgctgggattataggcgtgagccactgctcccagccgtgtgttcttttttaaatttagatatgtccagagaatcctctctcctgtttcccatttcattcgagaatattgtttgcttgtgagacgtaagttcgagccctgcatgcaatgacccttgaaggaaaataaacagtcctggtggtcccagacgctcctgcagccacaaaaaaaaaaaaaaaa

SEQ ID NO: 91 - DNA, 2655 bp, Homo sapiens
cccagaaggccgcggggggtggaccgcctaagagggcgtgcgctcccgacatgccccgcggcgcgccattaaccgccagatttgaatcgcgggacccgttggcagaggtggcggcggcggcatgggtgccccgacgttgccccctgcctggcagccctttctcaaggaccaccgcatctctacattcaagaactggcccttcttggagggctgcgcctgcaccccggagcggatggccgaggctggcttcatccactgccccactgagaacgagccagacttggcccagtgtttcttctgcttcaaggagctggaaggctgggagccagatgacgaccccatagaggaacataaaaagcattcgtccggttgcgctttcctttctgtcaagaagcagtttgaagaattaacccttggtgaatttttgaaactggacagagaaagagccaagaacaaaattgcaaaggaaaccaacaataagaagaaagaatttgaggaaactgcggagaaagtgcgccgtgccatcgagcagctggctgccatggattgaggcctctggccggagctgcctggtcccagagtggctgcaccacttccagggtttattccctggtgccaccagccttcctgtgggccccttagcaatgtcttaggaaaggagatcaacattttcaaattagatgtttcaactgtgctcttgttttgtcttgaaagtggcaccagaggtgcttctgcctgtgcagcgggtgctgctggtaacagtggctgcttctctctctctctctcttttttgggggctcatttttgctgttttgattcccgggcttaccaggtgagaagtgagggaggaagaaggcagtgtcccttttgctagagctgacagctttgttcgcgtgggcagagccttccacagtgaatgtgtctggacctcatgttgttgaggctgtcacagtcctgagtgtggacttggcaggtgcctgttgaatctgagctgcaggttccttatctgtcacacctgtgcctcctcagaggacagtttttttgttgttgtgtttttttgtttttttttttttggtagatgcatgacttgtgtgtgatgagagaatggagacagagtccctggctcctctactgtttaacaacatggctttcttattttgtttgaattgttaattcacagaatagcacaaactacaattaaaactaagcacaaagccattctaagtcattggggaaacggggtgaacttcaggtggatgaggagacagaatagagtgataggaagcgtctggcagatactccttttgccactgctgtgtgattagacaggcccagtgagccgcggggcacatgctggccgctcctccctcagaaaaaggcagtggcctaaatcctttttaaatgacttggctcgatgctgtgggggactggctgggctgctgcaggccgtgtgtctgtcagcccaaccttcacatctgtcacgttctccacacgggggagagacgcagtccgcccaggtccccgctttctttggaggcagcagctcccgcagggctgaagtctggcgtaagatgatggatttgattcgccctcctccctgtcatagagctgcagggtggattgttacagcttcgctggaaacctctggaggtcatctcggctgttcctgagaaataaaaagcctgtcatttcaaacactgctgtggaccctactgggtttttaaaatattgtcagtttttcatcgtcgtccctagcctgccaacagccatctgcccagacagccgcagtgaggatgagcgtcctggcagagacgcagttgtctctgggcgcttgccagagccacgaaccccagacctgtttgtatcatccgggctccttccgggcagaaacaactgaaaatgcacttcagacccacttatttctgccacatctgagtcggcctgagatagacttttccctctaaactgggagaatatcacagtggtttttgttagcagaaaatgcactccagcctctgtactcatctaagctgcttatttttgatatttgtgtcagtctgtaaatggatacttcactttaataactgttgcttagtaattggctttgtagagaagctggaaaaaaatggttttgtcttcaactcctttgcatgccaggcggtgatgtggatctcggcttctgtgagcctgtgctgtgggcagggctgagctggagccgcccctctcagcccgcctgccacggcctttccttaaaggccatccttaaaaccagaccctcatggctaccagcacctgaaagcttcctcgacatctgttaataaagccgtaggcccttgtctaagtgcaaccgcctagactttctttcagatacatgtccacatgtccatttttcaggttctctaagttggagtggagtctgggaagggttgtgaatgaggcttctgggctatgggtgaggttccaatggcaggttagagcccctcgggccaactgccatcctggaaagtagagacagcagtgcccgctgcccagaagagaccagcaagccaaactggagcccccattgcaggctgtcgccatgtggaaagagtaactcacaattgccaataaagtctcatgtggttttatctaaaaaaaaaaaaaaaaaaaaaaaaa

SEQ ID NO: 92 - DNA, 4786 bp, Homo sapiens
ctcggcgctgaaattcaaatttgaacggctgcagaggccgagtccgtcactggaagccgagaggagaggacagctggttgtgggagagttcccccgcctcagactcctggttttttccaggagacacactgagctgagactcacttttctcttcctgaatttgaaccaccgtttccatcgtctcgtagtccgacgcctggggcgatggatccgtttacggagaaactgctggagcgaacccgtgccaggcgagagaatcttcagagaaaaatggctgagaggcccacagcagctccaaggtctatgactcatgctaagcgagctagacagccactttcagaagcaagtaaccagcagcccctctctggtggtgaagagaaatcttgtacaaaaccatcgccatcaaaaaaacgctgttctgacaacactgaagtagaagtttctaacttggaaaataaacaaccagttgagtcgacatctgcaaaatcttgttctccaagtcctgtgtctcctcaggtgcagccacaagcagcagataccatcagtgattctgttgctgtcccggcatcactgctgggcatgaggagagggctgaactcaagattggaagcaactgcagcctcctcagttaaaacacgtatgcaaaaacttgcagagcaacggcgccgttgggataatgatgatatgacagatgacattcctgaaagctcactcttctcaccaatgccatcagaggaaaaggctgcttcccctcccagacctctgctttcaaatgcctcggcaactccagttggcagaaggggccgtctggccaatcttgctgcaactatttgctcctgggaagatgatgtaaatcactcatttgcaaaacaaaacagtgtacaagaacagcctggtaccgcttgtttatccaaattttcctctgcaagtggagcatctgctaggatcaatagcagcagtgttaagcaggaagctacattctgttcccaaagggatggcgatgcctctttgaataaagccctatcctcaagtgctgatgatgcgtctttggttaatgcctcaatttccagctctgtgaaagctacttctccagtgaaatctactacatctatcactgatgctaaaagttgtgagggacaaaatcctgagctacttccaaaaactcctattagtcctctgaaaacgggggtatcgaaaccaattgtgaagtcaactttatcccagacagttccatccaagggagaattaagtagagaaatttgtctgcaatctcaatctaaagacaaatctacgacaccaggaggaacaggaattaagcctttcctggaacgctttggagagcgttgtcaagaacatagcaaagaaagtccagctcgtagcacaccccacagaacccccattattactccaaatacaaaggccatccaagaaagattattcaagcaagacacatcttcatctactacccatttagcacaacagctcaagcaggaacgtcaaaaagaactagcatgtcttcgtggccgatttgacaagggcaatatatggagtgcagaaaaaggcggaaactcaaaaagcaaacaactagaaaccaaacaggaaactcactgtcagagcactcccctcaaaaaacaccaaggtgtttcaaaaactcagtcacttccagtaacagaaaaggtgaccgaaaaccagataccagccaaaaattctagtacagaacctaaaggtttcactgaatgcgaaatgacgaaatctagccctttgaaaataacattgtttttagaagaggacaaatccttaaaagtaacatcagacccaaaggttgagcagaaaattgaagtgatacgtgaaattgagatgagtgtggatgatgatgatatcaatagttcgaaagtaattaatgacctcttcagtgatgtcctagaggaaggtgaactagatatggagaagagccaagaggagatggatcaagcattagcagaaagcagcgaagaacaggaagatgcactgaatatctcctcaatgtctttacttgcaccattggcacaaacagttggtgtggtaagtccagagagtttagtgtccacacctagactggaattgaaagacaccagcagaagtgatgaaagtccaaaaccaggaaaattccaaagaactcgtgtccctcgagctgaatctggtgatagccttggttctgaagatcgtgatcttctttacagcattgatgcatatagatctcaaagattcaaagaaacagaacgtccatcaataaagcaggtgattgttcggaaggaagatgttacttcaaaactggatgaaaaaaataatgcctttccttgtcaagttaatatcaaacagaaaatgcaggaactcaataacgaaataaatatgcaacagacagtgatctatcaagctagccaggctcttaactgctgtgttgatgaagaacatggaaaagggtccctagaagaagctgaagcagaaagacttcttctaattgcaactgggaagagaacacttttgattgatgaattgaataaattgaagaacgaaggacctcagaggaagaataaggctagtccccaaagtgaatttatgccatccaaaggatcagttactttgtcagaaatccgcttgcctctaaaagcagattttgtctgcagtacggttcagaaaccagatgcagcaaattactattacttaattatactaaaagcaggagctgaaaatatggtagccacaccattagcaagtacttcaaactctcttaacggtgatgctctgacattcactactacatttactctgcaagatgtatccaatgactttgaaataaatattgaagtttacagcttggtgcaaaagaaagatccctcaggccttgataagaagaaaaaaacatccaagtccaaggctattactccaaagcgactcctcacatctataaccacaaaaagcaacattcattcttcagtcatggccagtccaggaggtcttagtgctgtgcgaaccagcaacttcgcccttgttggatcttacacattatcattgtcttcagtaggaaatactaagtttgttctggacaaggtcccctttttatcttctttggaaggtcatatttatttaaaaataaaatgtcaagtgaattccagtgttgaagaaagaggttttctaaccatatttgaagatgttagtggttttggtgcctggcatcgaagatggtgtgttctttctggaaactgtatatcttattggacttatccagatgatgagaaacgcaagaatcccataggaaggataaatctggctaattgtaccagtcgtcagatagaaccagccaacagagaattttgtgcaagacgcaacacttttgaattaattactgtccgaccacaaagagaagatgaccgagagactcttgtcagccaatgcagggacacactctgtgttaccaagaactggctgtctgcagatactaaagaagagcgggatctctggatgcaaaaactcaatcaagttcttgttgatattcgcctctggcaacctgatgcttgctacaaacctattggaaagccttaaaccgggaaatttccatgctatctagaggtttttgatgtcatcttaagaaacacacttaagagcatcagatttactgattgcattttatgctttaagtacgaaagggtttgtgccaatattcactacgtattatgcagtatttatatcttttgtatgtaaaactttaactgatttctgtcattcatcaatgagtagaagtaaatacattatagttgattttgctaaatcttaatttaaaagcctcattttcctagaaatctaattattcagttattcatgacaatatttttttaaaagtaagaaattctgagttgtcttcttggagctgtaggtcttgaagcagcaacgtctttcaggggttggagacagaaacccattctccaatctcagtagttttttcgaaaggctgtgatcatttattgatcgtgatatgacttgttactagggtactgaaaaaaatgtctaaggcctttacagaaacatttttagtaatgaggatgagaactttttcaaatagcaaatatatattggcttaaagcatgaggctgtcttcagaaaagtgatgtggacataggaggcaatgtgtgagacttgggggttcaatattttatatagaagagttaataagcacatggtttacatttactcagctactatatatgcagtgtggtgcacattttcacagaattctggcttcattaagatcattatttttgctgcgtagcttacagacttagcatattagttttttctactcctacaagtgtaaattgaaaaatctttatattaaaaaagtaaactgttatgaagctgctatgtactaataatactttgcttgccaaagtgtttgggttttgttgttgtttgtttgtttgtttgtttttggttcatgaacaacagtgtctagaaacccattttgaaagtggaaaattattaagtcacctatcacctttaaacgcctttttttaaaattataaaatattgtaaagcagggtctcaacttttaaatacactttgaacttcttctctgaattattaaagttctttatgacctcatttataaacactaaattctgtcacctcctgtcattttattttttattcattcaaatgtattttttcttgtgcatattataaaaatatattttatgagctcttactcaaataaatacctgtaaatgtctaaaggaaaaaaaaaaaaaaaaaa

SEQ ID NO: 93 - DNA, 2656 bp, Homo sapiens
cacacctgatggtgtgactcggccgacgcgagcgccgcgcttcgcttcagctgctagctggcccaagggaggcgaccgcggagggtggcgaggggcggccaggacccgcagccccggggccgggccggtccggaccgccagggagggcaggtcagtgggcagatcgcgtccgcgggattcaatctctgcccgctctgataacagtccttttccctggcgctcacttcgtgcctggcacccggctgggcgcctcaagaccgttgtctcttcgatcgcttctttggacttggcgaccatttcagagatgtcttccagaagtaccaaagatttaattaaaagtaagtggggatcgaagcctagtaactccaaatccgaaactacattagaaaaattaaagggagaaattgcacacttaaagacatcagtggatgaaatcacaagtgggaaaggaaagctgactgataaagagagacacagacttttggagaaaattcgagtccttgaggctgagaaggagaagaatgcttatcaactcacagagaaggacaaagaaatacagcgactgagagaccaactgaaggccagatatagtactaccgcattgcttgaacagctggaagagacaacgagagaaggagaaaggagggagcaggtgttgaaagccttatctgaagagaaagacgtattgaaacaacagttgtctgctgcaacctcacgaattgctgaacttgaaagcaaaaccaatacactccgtttatcacagactgtggctccaaactgcttcaactcatcaataaataatattcatgaaatggaaatacagctgaaagatgctctggagaaaaatcagcagtggctcgtgtatgatcagcagcgggaagtctatgtaaaaggacttttagcaaagatctttgagttggaaaagaaaacggaaacagctgctcattcactcccacagcagacaaaaaagcctgaatcagaaggttatcttcaagaagagaagcagaaatgttacaacgatctcttggcaagtgcaaaaaaagatcttgaggttgaacgacaaaccataactcagctgagttttgaactgagtgaatttcgaagaaaatatgaagaaacccaaaaagaagttcacaatttaaatcagctgttgtattcacaaagaagggcagatgtgcaacatctggaagatgataggcataaaacagagaagatacaaaaactcagggaagagaatgatattgctaggggaaaacttgaagaagagaagaagagatccgaagagctcttatctcaggtccagtttctttacacatctctgctaaagcagcaagaagaacaaacaagggtagctctgttggaacaacagatgcaggcatgtactttagactttgaaaatgaaaaactcgaccgtcaacatgtgcagcatcaattgcatgtaattcttaaggagctccgaaaagcaagaaatcaaataacacagttggaatccttgaaacagcttcatgagtttgccatcacagagccattagtcactttccaaggagagactgaaaacagagaaaaagttgccgcctcaccaaaaagtcccactgctgcactcaatgaaagcctggtggaatgtcccaagtgcaatatacagtatccagccactgagcatcgcgatctgcttgtccatgtggaatactgttcaaagtagcaaaataagtatttgttttgatattaaaagattcaatactgtattttctgttagcttgtgggcattttgaattatatatttcacattttgcataaaactgcctatctacctttgacactccagcatgctagtgaatcatgtatcttttaggctgctgtgcatttctcttggcagtgatacctccctgacatggttcatcatcaggctgcaatgacagaatgtggtgagcagcgtctactgagactactaacattttgcactgtcaaaatacttggtgaggaaaagatagctcaggttattgctaatgggttaatgcaccagcaagcaaaatattttatgttttgggggttttgaaaaatcaaagataattaaccaaggatcttaactgtgttcgcattttttatccaagcacttagaaaacctacaatcctaattttgatgtccattgttaagaggtggtgatagatactattttttttttcatattgtatagcggttattagaaaagttggggattttcttgatctttattgctgcttaccattgaaacttaacccagctgtgttccccaactctgttctgcgcacgaaacagtatctgtttgaggcataatcttaagtggccacacacaatgttttctcttatgttatctggcagtaactgtaacttgaattacattagcacattctgcttagctaaaattgttaaaataaactttaataaacccatgtagccctctcatttgattgacagtattttagttatttttggcattcttaaagctgggcaatgtaatgatcagatctttgtttgtctgaacaggtatttttatacatgctttttgtaaaccaaaaacttttaaatttcttcaggttttctaacatgcttaccactgggctactgtaaatgagaaaagaataaaattatttaatgttttaaaaaaaaaaaaaaaaaaaa

SEQ ID NO: 94 - DNA, 1393 bp, Homo sapiens
ggagcatcgcggctcaggctgcgggaaagcggtgcgcgtgcagcggggtgggtgccctggtccgcgggcgagctcgagcagccaaccccgggcgcgtcggggccatggacggcctgaggcagcgcgtggagcacttcctggagcaaaggaacctggtcaccgaagtgctgggggcgctggaggccaagaccggggtggagaagcggtatctggctgcaggagccgtcactctgctaagcctgtatctgctgttcggctacggagcgtctctgctgtgcaatctcatcggatttgtgtaccccgcatatgcctcaatcaaagctatcgagagcccaagcaaggacgacgacactgtgtggctcacctactgggtggtgtacgccctgtttgggctggccgagttcttcagcgatctactcctgtcctggttccctttctactacgtgggcaagtgcgccttcctgttgttctgcatggctcccaggccctggaacggggctctcatgctgtatcagcgcgtcgtgcgtccgctgttcctaaggcaccacggggccgtagacagaatcatgaacgacctcagcgggcgagccctggacgcggcggccggaataaccaggaacgtcaagccaagccagaccccgcagccgaaggacaagtgaagcagccccctgagcctcacaaggacctcctggctggtgaggagggggccgcgccaggctcccaggcctccacagagtcttcagcgcatcccccaacagcagcccctgccagtccctcgggtccaggcaaggccctgggggtctccttaaatgccacctcgggcaagtcccagtcccagtcctcggccacccccagctctggatcccagggccagctgccctctggctctggctgtggctcccgcctgtccggcagggcccagggccagcgtcgggcacagggcagctcccactggtctcggcaacacacccagccgcctggtacttcctccagcccctcccagtcagccctcccgtcctcggggcccctgcagccacccaacgtcacctccagcccggtctcacccatggtccagtctcccagcagcagcaacatccccacgcagccccccagcaagtcctctggcaagccggaggacgcagcccccaagaccagcggacagcgccagaaggaatcgtcgaaacagcctgccagcagcgcctcagtgcccgagctggtcccctgccattccgggacctctctggagtacacttcggagtccaccaccgagatcacctgcagctggccacaccacaggcccccgtgcctgcagcactactggtgcctgaaacacctggcctgctaggaggctccaataaagctaacccggaccaaaaaaaaaaaaaaaaaaaaa

SEQ ID NO: 95 - DNA, 3038 bp, Homo sapiens
aaaaaaatttcccagagacacgtggaaccgaggggccaaccccggcctaggctctccaccgcatcggattctggaatttacgatcacgaaagttctattgtcccgcgattggctcccgggccgcatgacatcatagcgcttgattcatccttcgggtcccgattggctggccgcgccattgtgacgtcacggtcagcccacgttctgattgtagatagccggcgccttcctcttcccatcgcgcgggtcctagccaccggtgtctccttctacatccgcctctgcgccggctgccacccgcgctccctccgccgccgccgccttgctgctgctcaaagctgctgccgccccttgggctaaaaggttttcaaatggaacattttgatgcatcacttagtacctatttcaaggcattgctaggccctcgagatactagagtaaaaggatggtttcttctggacaattatatacccacatttatctgctctgtcatatatttactaattgtatggctgggaccaaaatacatgaggaataaacagccattctcttgccgggggattttagtggtgtataaccttggactcacactgctgtctctgtatatgttctgtgagttagtaacaggagtatgggaaggcaaatacaacttcttctgtcagggcacacgcaccgcaggagaatcagatatgaagattatccgtgtcctctggtggtactacttctccaaactcatagaatttatggacactttcttcttcatcctgcgcaagaacaaccaccagatcacggtcctgcacgtctaccaccatgcctcgatgctgaacatctggtggtttgtgatgaactgggtcccctgcggccactcttattttggtgccacacttaatagcttcatccacgtcctcatgtactcttactatggtttgtcgtcagtcccttccatgcgtccatacctctggtggaagaagtacatcactcaggggcagctgcttcagtttgtgctgacaatcatccagaccagctgcggggtcatctggccgtgcacattccctcttggttggttgtatttccagattggatacatgatttccctgattgctctcttcacaaacttctacattcagacctacaacaagaaaggggcctcccgaaggaaagaccacctgaaggaccaccagaatgggtccatggctgctgtgaatggacacaccaacagcttttcacccctggaaaacaatgtgaagccaaggaagctgcggaaggattgaagtcaaagaattgaaaccctccaaaccacgtcatctgattgtaagcacaatatgagttgtgccccaatgctcgttaacagctgctgtaactagtctggcctacaatagtgtgattcatgtaggacttctttcatcaattcaaaacccctagaaaacgtatacagattatataagtagggataagatttctaacatttctgggctctctgacccctgcgctagactgtggaaagggagtattattatagtatacaacactgctgttgccttattagttataacatgataggtgctgaattgtgattcacaatttaaaaacactgtaatccaaacttttttttttaactgtagatcatgcatgtgattgtaaatgtaaatttgtacaatgttgttatggtagagaaacacacatgccttaaaatttaaaaagcagggcccaaagcttattagtttaaattagggtatgtttcaagtttgtattaatttgtaatagctctgtttagaaaaaatcaaagaccatgatttatgaaactaatgtgacataatttccagtgacttgttgatgtgaaatcagacacggcaccttcagttttgtactattggctttgaatcaagcaggctcaaatctagtggaacagtcagtttaactttttaacagatcttatttttttattttgagtgccactattaatgtaaaaaggggggggctctacagcagtcgtgatgaaacttaaatatatattctttgtcctcgagattttaggaagggtgtagggtgagtaggccatttttaatttctgaagtgctaagtgtttttatacagcaaacaaaaagtcaattttgctttccaccagtgcgagagaggatgtatacttttcaagagagatgattgcctatttaccgtttgacagagtcccgtagatgagcaatggggaactggttgccagggtctaaatttggattgatttatgcactgttatctgttttgacacagatttccttgtaaaatgtgcctagtttaccaaaattaacaaagggggggaaaggaccttagaactttttaaggtaaaatcaaatatagctacagcataagagaatcgagaaatttgatagaggtaacttgtttaatgtaaatctaatagtacttgtaatttctttctgcttagaatctaaagatgtgtttagaacctcttgtttaaaaataatagactgcttatcataaaatcacatctcacacatttgaggcagtggtcaaacaggtaaagcctatgatgtgtgtcattttaaagtgtcggaatttagcctctgaataccttctccattgggggaaagatattcttggaaccactcatgacatatcttagaaggtcattgacaatgtataaactaattgttggtttgatatttatgtaaatatcagtttaccatgctttaattttgcacattcgtactatagggagcctattggttctctattagtcttgtgggttttctgtttgaaaaggagtcatggcatctgtttacatttaccttatcaaacctagaatgtgtatatttataaatgtatgtcttcattgctaggtactaatttgcagatgtctttacatatttcaatacagaaactataacattcaatagtgtgctgtcaaagtgtgcttagctcacctggatatacctacattgttaaatgtctaaacagtaatcattaaaacatttttgattacctgtgaaaaaaaaaaaaaaaaaaaaaaaaaaaaaaaaaaaaaa

SEQ ID NO: 96 - DNA, 2207 bp, Homo sapiens
acgcacttggcgcgcggcgcgggctgcagacggctgcgaggcgctgggcacaggtgtcctgatggcaaatttcaagggccacgcgcttccagggagtttcttcctgatcattgggctgtgttggtcagtgaagtacccgctgaagtactttagccacacgcggaagaacagcccactacattactatcagcgtctcgagatcgtcgaagccgcaattaggactttgttttccgtcactgggatcctggcagagcagtttgttccggatgggccccacctgcacctctaccatgagaaccactggataaagttaatgaattggcagcacagcaccatgtacctattctttgcagtctcaggaattgttgacatgctcacctatctggtcagccacgttcccttgggggtggacagactggttatggctgtggcagtattcatggaaggtttcctcttctactaccacgtccacaaccggcctccgctggaccagcacatccactcactcctgctgtatgctctgttcggagggtgtgttagtatctccctagaggtgatcttccgggaccacattgtgctggaacttttccgaaccagtctcatcattcttcagggaacctggttctggcagattgggtttgtgctgttcccaccttttggaacacccgaatgggaccagaaggatgatgccaacctcatgttcatcaccatgtgcttctgctggcactacctggctgccctcagcattgtggccgtcaactattctcttgtttactgccttttgactcggatgaagagacacggaaggggagaaatcattggaattcagaagctgaattcagatgacacttaccagaccgccctcttgagtggctcagatgaggaatgagccgagatgcggagggcgcagatgtcccactgcacagctggaatgaatggagttcatcccctccacctgaatgcctgctgtggtctgatcttaagggtctatatatttgcacctcctcattcaacacagggctggaggttctacaacaggaaatcaggcctacagcatcctgtgtatcttgcagttgggatttttaaacatactataaagtctgtgttggtatagtacccttcataaggaaaaatgaagtaatgcctataagtagcaggcctttgtgcctcagtgtcaagagaaatcaagagatgctaaaagctttacaatggaagtggcctcatggatgaatccggggtatgagcccaggagaacgtgctgcttttggtaacttatccctttttctcttaagaaagcaggtactttcttattagaaatatgttagaatgtgtaagcaaacgacagtgcctttagaattacaattctaacttacatattttttgaaagtaaaataattcacaagctttggtattttaaaattattgttaaacatatcataactaatcataccagggtactgcaataccactgtttataagtgacaaaattaggccaaaggtgatttttttttaaatcaggaagctggttactggctctactgagagttggagccctgatgttctgattcttcaaagtcaccctaaaagaagatctgacaggaaagctgtataatgagatagaaaaacgtcaggtatggaaggctttcagttttaatatggctgaaagcaaaggataacgaattcagaattagtaatgtaaaatcttgataccctaatcttgcttctggatctgttctttttttaaaaaaacttccttcaccgcgcctataatcctagcactttgggaggccgaggcaggcagatcacggggtcaggagatcaagaccatcctggctaacatggtgaaaccccgtctctactgaaaatacaaaaaattagccgggtgtggtggcgggcgcctgtagttccagctactcgggaggctgaggcaagagaatggcatgaacccggtaggggagcttgcagtgagcccagatcatgccactgtactccagcctaggtgacagagcaagactctgtctcaaaaacaagcaaacagacttccttcaacaaatatttattaaatatccactttgcaacagcactgaaatggctgtaaggactcctgagatatgtgtccagcaaggagtttacagtcaaacaggagagacatgcctgtagttacatccagtgtgatgggtgctgagaggcaagtacaaaccacgatg

SEQ ID NO: 97 - DNA, 3010 bp, Homo sapiens
agcattgaccaataggagaccgtagtgatagcgacggggaaattcaaacgtgtttgcggaaaggagtttgggttccatcttttcatttccccagcgcagctttctgtagaaatggaatccgaggatttaagtggcagagaattgacaattgattccataatgaacaaagtgagagacattaaaaataagtttaaaaatgaagaccttactgatgaactaagcttgaataaaatttctgctgatactacagataactcgggaactgttaaccaaattatgatgatggcaaacaacccagaggactggttgagtttgttgctcaaactagagaaaaacagtgttccgctaagtgatgctcttttaaataaattgattggtcgttacagtcaagcaattgaagcgcttcccccagataaatatggccaaaatgagagttttgctagaattcaagtgagatttgctgaattaaaagctattcaagagccagatgatgcacgtgactactttcaaatggccagagcaaactgcaagaaatttgcttttgttcatatatcttttgcacaatttgaactgtcacaaggtaatgtcaaaaaaagtaaacaacttcttcaaaaagctgtagaacgtggagcagtaccactagaaatgctggaaattgccctgcggaatttaaacctccaaaaaaagcagctgctttcagaggaggaaaagaagaatttatcagcatctacggtattaactgcccaagaatcattttccggttcacttgggcatttacagaataggaacaacagttgtgattccagaggacagactactaaagccaggtttttatatggagagaacatgccaccacaagatgcagaaataggttaccggaattcattgagacaaactaacaaaactaaacagtcatgcccatttggaagagtcccagttaaccttctaaatagcccagattgtgatgtgaagacagatgattcagttgtaccttgttttatgaaaagacaaacctctagatcagaatgccgagatttggttgtgcctggatctaaaccaagtggaaatgattcctgtgaattaagaaatttaaagtctgttcaaaatagtcatttcaaggaacctctggtgtcagatgaaaagagttctgaacttattattactgattcaataaccctgaagaataaaacggaatcaagtcttctagctaaattagaagaaactaaagagtatcaagaaccagaggttccagagagtaaccagaaacagtggcaatctaagagaaagtcagagtgtattaaccagaatcctgctgcatcttcaaatcactggcagattccggagttagcccgaaaagttaatacagagcagaaacataccacttttgagcaacctgtcttttcagtttcaaaacagtcaccaccaatatcaacatctaaatggtttgacccaaaatctatttgtaagacaccaagcagcaataccttggatgattacatgagctgttttagaactccagttgtaaagaatgactttccacctgcttgtcagttgtcaacaccttatggccaacctgcctgtttccagcagcaacagcatcaaatacttgccactccacttcaaaatttacaggttttagcatcttcttcagcaaatgaatgcatttcggttaaaggaagaatttattccatattaaagcagataggaagtggaggttcaagcaaggtatttcaggtgttaaatgaaaagaaacagatatatgctataaaatatgtgaacttagaagaagcagataaccaaactcttgatagttaccggaacgaaatagcttatttgaataaactacaacaacacagtgataagatcatccgactttatgattatgaaatcacggaccagtacatctacatggtaatggagtgtggaaatattgatcttaatagttggcttaaaaagaaaaaatccattgatccatgggaacgcaagagttactggaaaaatatgttagaggcagttcacacaatccatcaacatggcattgttcacagtgatcttaaaccagctaactttctgatagttgatggaatgctaaagctaattgattttgggattgcaaaccaaatgcaaccagatacaacaagtgttgttaaagattctcaggttggcacagttaattatatgccaccagaagcaatcaaagatatgtcttcctccagagagaatgggaaatctaagtcaaagataagccccaaaagtgatgtttggtccttaggatgtattttgtactatatgacttacgggaaaacaccatttcagcagataattaatcagatttctaaattacatgccataattgatcctaatcatgaaattgaatttcccgatattccagagaaagatcttcaagatgtgttaaagtgttgtttaaaaagggacccaaaacagaggatatccattcctgagctcctggctcatccatatgttcaaattcaaactcatccagttaaccaaatggccaagggaaccactgaagaaatgaaatatgttctgggccaacttgttggtctgaattctcctaactccattttgaaagctgctaaaactttatatgaacactatagtggtggtgaaagtcataattcttcatcctccaagacttttgaaaaaaaaaggggaaaaaaatgatttgcagttattcgtaatgtcagataccacctataaaatatattggactgttatactcttgaatccctgtggaaatctacatttgaagacaacatcactctgaagtgttatcagcaaaaaaaattcagtagattatctttaaaagaaaactgtaaaaatagcaaccacttatggcactgtatatattgtagacttgttttctctgttttatgctcttgtgtaatctacttgacatcattttactcttggaatagtgggtggatagcaagtatattctaaaaaactttgtaaataaagttttgtggctaaaatgacactaacattt

SEQ ID NO: 98 - DNA, 10661 bp, Homo sapiens
cgagatcccggggagccagcttgctgggagagcgggacggtccggagcaagcccagaggcagaggaggcgacagagggaaaaagggccgagctagccgctccagtgctgtacaggagccgaagggacgcaccacgccagccccagcccggctccagcgacagccaacgcctcttgcagcgcggcggcttcgaagccgccgcccggagctgccctttcctcttcggtgaagtttttaaaagctgctaaagactcggaggaagcaaggaaagtgcctggtaggactgacggctgcctttgtcctcctcctctccaccccgcctccccccaccctgccttccccccctcccccgtcttctctcccgcagctgcctcagtcggctactctcagccaacccccctcaccacccttctccccacccgcccccccgcccccgtcggcccagcgctgccagcccgagtttgcagagaggtaactccctttggctgcgagcgggcgagctagctgcacattgcaaagaaggctcttaggagccaggcgactggggagcggcttcagcactgcagccacgacccgcctggttaggctgcacgcggagagaaccctctgttttcccccactctctctccacctcctcctgccttccccaccccgagtgcggagccagagatcaaaagatgaaaaggcagtcaggtcttcagtagccaaaaaacaaaacaaacaaaaacaaaaaagccgaaataaaagaaaaagataataactcagttcttatttgcacctacttcagtggacactgaatttggaaggtggaggattttgtttttttcttttaagatctgggcatcttttgaatctacccttcaagtattaagagacagactgtgagcctagcagggcagatcttgtccaccgtgtgtcttcttctgcacgagactttgaggctgtcagagcgctttttgcgtggttgctcccgcaagtttccttctctggagcttcccgcaggtgggcagctagctgcagcgactaccgcatcatcacagcctgttgaactcttctgagcaagagaaggggaggcggggtaagggaagtaggtggaagattcagccaagctcaaggatggaagtgcagttagggctgggaagggtctaccctcggccgccgtccaagacctaccgaggagctttccagaatctgttccagagcgtgcgcgaagtgatccagaacccgggccccaggcacccagaggccgcgagcgcagcacctcccggcgccagtttgctgctgctgcagcagcagcagcagcagcagcagcagcagcagcagcagcagcagcagcagcagcagcagcagcagcaagagactagccccaggcagcagcagcagcagcagggtgaggatggttctccccaagcccatcgtagaggccccacaggctacctggtcctggatgaggaacagcaaccttcacagccgcagtcggccctggagtgccaccccgagagaggttgcgtcccagagcctggagccgccgtggccgccagcaaggggctgccgcagcagctgccagcacctccggacgaggatgactcagctgccccatccacgttgtccctgctgggccccactttccccggcttaagcagctgctccgctgaccttaaagacatcctgagcgaggccagcaccatgcaactccttcagcaacagcagcaggaagcagtatccgaaggcagcagcagcgggagagcgagggaggcctcgggggctcccacttcctccaaggacaattacttagggggcacttcgaccatttctgacaacgccaaggagttgtgtaaggcagtgtcggtgtccatgggcctgggtgtggaggcgttggagcatctgagtccaggggaacagcttcggggggattgcatgtacgccccacttttgggagttccacccgctgtgcgtcccactccttgtgccccattggccgaatgcaaaggttctctgctagacgacagcgcaggcaagagcactgaagatactgctgagtattcccctttcaagggaggttacaccaaagggctagaaggcgagagcctaggctgctctggcagcgctgcagcagggagctccgggacacttgaactgccgtctaccctgtctctctacaagtccggagcactggacgaggcagctgcgtaccagagtcgcgactactacaactttccactggctctggccggaccgccgccccctccgccgcctccccatccccacgctcgcatcaagctggagaacccgctggactacggcagcgcctgggcggctgcggcggcgcagtgccgctatggggacctggcgagcctgcatggcgcgggtgcagcgggacccggttctgggtcaccctcagccgccgcttcctcatcctggcacactctcttcacagccgaagaaggccagttgtatggaccgtgtggtggtggtgggggtggtggcggcggcggcggcggcggcggcggcggcggcggcggcggcggcggcggcgaggcgggagctgtagccccctacggctacactcggccccctcaggggctggcgggccaggaaagcgacttcaccgcacctgatgtgtggtaccctggcggcatggtgagcagagtgccctatcccagtcccacttgtgtcaaaagcgaaatgggcccctggatggatagctactccggaccttacggggacatgcgtttggagactgccagggaccatgttttgcccattgactattactttccaccccagaagacctgcctgatctgtggagatgaagcttctgggtgtcactatggagctctcacatgtggaagctgcaaggtcttcttcaaaagagccgctgaagggaaacagaagtacctgtgcgccagcagaaatgattgcactattgataaattccgaaggaaaaattgtccatcttgtcgtcttcggaaatgttatgaagcagggatgactctgggagcccggaagctgaagaaacttggtaatctgaaactacaggaggaaggagaggcttccagcaccaccagccccactgaggagacaacccagaagctgacagtgtcacacattgaaggctatgaatgtcagcccatctttctgaatgtcctggaagccattgagccaggtgtagtgtgtgctggacacgacaacaaccagcccgactcctttgcagccttgctctctagcctcaatgaactgggagagagacagcttgtacacgtggtcaagtgggccaaggccttgcctggcttccgcaacttacacgtggacgaccagatggctgtcattcagtactcctggatggggctcatggtgtttgccatgggctggcgatccttcaccaatgtcaactccaggatgctctacttcgcccctgatctggttttcaatgagtaccgcatgcacaagtcccggatgtacagccagtgtgtccgaatgaggcacctctctcaagagtttggatggctccaaatcaccccccaggaattcctgtgcatgaaagcactgctactcttcagcattattccagtggatgggctgaaaaatcaaaaattctttgatgaacttcgaatgaactacatcaaggaactcgatcgtatcattgcatgcaaaagaaaaaatcccacatcctgctcaagacgcttctaccagctcaccaagctcctggactccgtgcagcctattgcgagagagctgcatcagttcacttttgacctgctaatcaagtcacacatggtgagcgtggactttccggaaatgatggcagagatcatctctgtgcaagtgcccaagatcctttctgggaaagtcaagcccatctatttccacacccagtgaagcattggaaaccctatttccccaccccagctcatgccccctttcagatgtcttctgcctgttataactctgcactactcctctgcagtgccttggggaatttcctctattgatgtacagtctgtcatgaacatgttcctgaattctatttgctgggctttttttttctctttctctcctttctttttcttcttccctccctatctaaccctcccatggcaccttcagactttgcttcccattgtggctcctatctgtgttttgaatggtgttgtatgcctttaaatctgtgatgatcctcatatggcccagtgtcaagttgtgcttgtttacagcactactctgtgccagccacacaaacgtttacttatcttatgccacgggaagtttagagagctaagattatctggggaaatcaaaacaaaaacaagcaaacaaaaaaaaaaagcaaaaacaaaacaaaaaataagccaaaaaaccttgctagtgttttttcctcaaaaataaataaataaataaataaatacgtacatacatacacacatacatacaaacatatagaaatccccaaagaggccaatagtgacgagaaggtgaaaattgcaggcccatggggagttactgattttttcatctcctccctccacgggagactttattttctgccaatggctattgccattagagggcagagtgaccccagagctgagttgggcaggggggtggacagagaggagaggacaaggagggcaatggagcatcagtacctgcccacagccttggtccctgggggctagactgctcaactgtggagcaattcattatactgaaaatgtgcttgttgttgaaaatttgtctgcatgttaatgcctcacccccaaacccttttctctctcactctctgcctccaacttcagattgactttcaatagtttttctaagacctttgaactgaatgttctcttcagccaaaacttggcgacttccacagaaaagtctgaccactgagaagaaggagagcagagatttaaccctttgtaaggccccatttggatccaggtctgctttctcatgtgtgagtcagggaggagctggagccagaggagaagaaaatgatagcttggctgttctcctgcttaggacactgactgaatagttaaactctcactgccactaccttttccccacctttaaaagacctgaatgaagttttctgccaaactccgtgaagccacaagcaccttatgtcctcccttcagtgttttgtgggcctgaatttcatcacactgcatttcagccatggtcatcaagcctgtttgcttcttttgggcatgttcacagattctctgttaagagcccccaccaccaagaaggttagcaggccaacagctctgacatctatctgtagatgccagtagtcacaaagatttcttaccaactctcagatcgctggagcccttagacaaactggaaagaaggcatcaaagggatcaggcaagctgggcgtcttgcccttgtcccccagagatgataccctcccagcaagtggagaagttctcacttccttctttagagcagctaaaggggctacccagatcagggttgaagagaaaactcaattaccagggtgggaagaatgaaggcactagaaccagaaaccctgcaaatgctcttcttgtcacccagcatatccacctgcagaagtcatgagaagagagaaggaacaaagaggagactctgactactgaattaaaatcttcagcggcaaagcctaaagccagatggacaccatctggtgagtttactcatcatcctcctctgctgctgattctgggctctgacattgcccatactcactcagattccccacctttgttgctgcctcttagtcagagggaggccaaaccattgagactttctacagaaccatggcttctttcggaaaggtctggttggtgtggctccaatactttgccacccatgaactcagggtgtgccctgggacactggttttatatagtcttttggcacacctgtgttctgttgacttcgttcttcaagcccaagtgcaagggaaaatgtccacctactttctcatcttggcctctgcctccttacttagctcttaatctcatctgttgaactcaagaaatcaagggccagtcatcaagctgcccattttaattgattcactctgtttgttgagaggatagtttctgagtgacatgatatgatccacaagggtttccttccctgatttctgcattgatattaatagccaaacgaacttcaaaacagctttaaataacaagggagaggggaacctaagatgagtaatatgccaatccaagactgctggagaaaactaaagctgacaggttccctttttggggtgggatagacatgttctggttttctttattattacacaatctggctcatgtacaggatcacttttagctgttttaaacagaaaaaaatatccaccactcttttcagttacactaggttacattttaataggtcctttacatctgttttggaatgattttcatcttttgtgatacacagattgaattatatcattttcatatctctccttgtaaatactagaagctctcctttacatttctctatcaaatttttcatctttatgggtttcccaattgtgactcttgtcttcatgaatatatgtttttcatttgcaaaagccaaaaatcagtgaaacagcagtgtaattaaaagcaacaactggattactccaaatttccaaatgacaaaactagggaaaaatagcctacacaagcctttaggcctactctttctgtgcttgggtttgagtgaacaaaggagattttagcttggctctgttctcccatggatgaaaggaggaggattttttttttcttttggccattgatgttctagccaatgtaattgacagaagtctcattttgcatgcgctctgctctacaaacagagttggtatggttggtatactgtactcacctgtgagggactggccactcagacccacttagctggtgagctagaagatgaggatcactcactggaaaagtcacaaggaccatctccaaacaagttggcagtgctcgatgtggacgaagagtgaggaagagaaaaagaaggagcaccagggagaaggctccgtctgtgctgggcagcagacagctgccaggatcacgaactctgtagtcaaagaaaagagtcgtgtggcagtttcagctctcgttcattgggcagctcgcctaggcccagcctctgagctgacatgggagttgttggattctttgtttcatagctttttctatgccataggcaatattgttgttcttggaaagtttattatttttttaactcccttactctgagaaagggatattttgaaggactgtcatatatctttgaaaaaagaaaatctgtaatacatatatttttatgtatgttcactggcactaaaaaatatagagagcttcattctgtcctttgggtagttgctgaggtaattgtccaggttgaaaaataatgtgctgatgctagagtccctctctgtccatactctacttctaaatacatataggcatacatagcaagttttatttgacttgtactttaagagaaaatatgtccaccatccacatgatgcacaaatgagctaacattgagcttcaagtagcttctaagtgtttgtttcattaggcacagcacagatgtggcctttccccccttctctcccttgatatctggcagggcataaaggcccaggccacttcctctgccccttcccagccctgcaccaaagctgcatttcaggagactctctccagacagcccagtaactacccgagcatggcccctgcatagccctggaaaaataagaggctgactgtctacgaattatcttgtgccagttgcccaggtgagagggcactgggccaagggagtggttttcatgtttgacccactacaaggggtcatgggaatcaggaatgccaaagcaccagatcaaatccaaaacttaaagtcaaaataagccattcagcatgttcagtttcttggaaaaggaagtttctacccctgatgcctttgtaggcagatctgttctcaccattaatctttttgaaaatcttttaaagcagtttttaaaaagagagatgaaagcatcacattatataaccaaagattacattgtacctgctaagataccaaaattcataagggcagggggggagcaagcattagtgcctctttgataagctgtccaaagacagactaaaggactctgctggtgactgacttataagagctttgtgggtttttttttccctaataatatacatgtttagaagaattgaaaataatttcgggaaaatgggattatgggtccttcactaagtgattttataagcagaactggctttccttttctctagtagttgctgagcaaattgttgaagctccatcattgcatggttggaaatggagctgttcttagccactgtgtttgctagtgcccatgttagcttatctgaagatgtgaaacccttgctgataagggagcatttaaagtactagattttgcactagagggacagcaggcagaaatccttatttctgcccactttggatggcacaaaaagttatctgcagttgaaggcagaaagttgaaatacattgtaaatgaatatttgtatccatgtttcaaaattgaaatatatatatatatatatatatatatatatatatatatatagtgtgtgtgtgtgttctgatagctttaactttctctgcatctttatatttggttccagatcacacctgatgccatgtacttgtgagagaggatgcagttttgttttggaagctctctcagaacaaacaagacacctggattgatcagttaactaaaagttttctcccctattgggtttgacccacaggtcctgtgaaggagcagagggataaaaagagtagaggacatgatacattgtactttactagttcaagacagatgaatgtggaaagcataaaaactcaatggaactgactgagatttaccacagggaaggcccaaacttggggccaaaagcctacccaagtgattgaccagtggccccctaatgggacctgagctgttggaagaagagaactgttccttggtcttcaccatccttgtgagagaagggcagtttcctgcattggaacctggagcaagcgctctatctttcacacaaattccctcacctgagattgaggtgctcttgttactgggtgtctgtgtgctgtaattctggttttggatatgttctgtaaagattttgacaaatgaaaatgtgtttttctctgttaaaacttgtcagagtactagaagttgtatctctgtaggtgcaggtccatttctgcccacaggtagggtgtttttctttgattaagagattgacacttctgttgcctaggacctcccaactcaaccatttctaggtgaaggcagaaaaatccacattagttactcctcttcagacatttcagctgagataacaaatcttttggaattttttcacccatagaaagagtggtagatatttgaatttagcaggtggagtttcatagtaaaaacagcttttgactcagctttgatttatcctcatttgatttggccagaaagtaggtaatatgcattgattggcttctgattccaattcagtatagcaaggtgctaggttttttcctttccccacctgtctcttagcctggggaattaaatgagaagccttagaatgggtggcccttgtgacctgaaacacttcccacataagctacttaacaagattgtcatggagctgcagattccattgcccaccaaagactagaacacacacatatccatacaccaaaggaaagacaattctgaaatgctgtttctctggtggttccctctctggctgctgcctcacagtatgggaacctgtactctgcagaggtgacaggccagatttgcattatctcacaaccttagcccttggtgctaactgtcctacagtgaagtgcctggggggttgtcctatcccataagccacttggatgctgacagcagccaccatcagaatgacccacgcaaaaaaaagaaaaaaaaaattaaaaagtcccctcacaacccagtgacacctttctgctttcctctagactggaacattgattagggagtgcctcagacatgacattcttgtgctgtccttggaattaatctggcagcaggagggagcagactatgtaaacagagataaaaattaattttcaatattgaaggaaaaaagaaataagaagagagagagaaagaaagcatcacacaaagattttcttaaaagaaacaattttgcttgaaatctctttagatggggctcatttctcacggtggcacttggcctccactgggcagcaggaccagctccaagcgctagtgttctgttctctttttgtaatcttggaatcttttgttgctctaaatacaattaaaaatggcagaaacttgtttgttggactacatgtgtgactttgggtctgtctctgcctctgctttcagaaatgtcatccattgtgtaaaatattggcttactggtctgccagctaaaacttggccacatcccctgttatggctgcaggatcgagttattgttaacaaagagacccaagaaaagctgctaatgtcctcttatcattgttgttaatttgttaaaacataaagaaatctaaaatttcaaaaaa

SEQ ID NO: 99 - DNA, 4542 bp, Homo sapiens
ggtaggcgcgcccagacctgagacgggttgggactgggctgcgtcacgcgcgggctctaagcgcccggggccccgcccagtggccggcacagccaatcgcagcgcgggaaggcggtgggggcggggaaggccgcctggaaacttaaatcccgaggcgggcgaacctgcaccagaccgcggacgtctgtaatctcagaggcttgtttgctgagggtgcctgcgcagctgcgacggctgctggttttgaaacatgaatctttcgctcgtcctggctgccttttgcttgggaatagcctccgctgttccaaaatttgaccaaaatttggatacaaagtggtaccagtggaaggcaacacacagaagattatatggcgcgaatgaagaaggatggaggagagcagtgtgggaaaagaatatgaaaatgattgaactgcacaatggggaatacagccaagggaaacatggcttcacaatggccatgaatgcttttggtgacatgaccaatgaagaattcaggcagatgatgggttgctttcgaaaccagaaattcaggaaggggaaagtgttccgtgagcctctgtttcttgatcttcccaaatctgtggattggagaaagaaaggctacgtgacgccagtgaagaatcagaaacagtgtggttcttgttgggcttttagtgcgactggtgctcttgaaggacagatgttccggaaaactgggaaacttgtctcactgagcgagcagaatctggtggactgttcgcgtcctcaaggcaatcagggctgcaatggtggcttcatggctagggccttccagtatgtcaaggagaacggaggcctggactctgaggaatcctatccatatgtagcagtggatgaaatctgtaagtacagacctgagaattctgttgctaatgacactggcttcacagtggtcgcacctggaaaggagaaggccctgatgaaagcagtcgcaactgtggggcccatctccgttgctatggatgcaggccattcgtccttccagttctacaaatcaggcatttattttgaaccagactgcagcagcaaaaacctggatcatggtgttctggtggttggctacggctttgaaggagcaaattcgaataacagcaagtattggctcgtcaaaaacagctggggtccagaatggggctcgaatggctatgtaaaaatagccaaagacaagaacaaccactgtggaatcgccacagcagccagctaccccaatgtgtgagctgatggatggtgaggaggaaggacttaaggacagcatgtctggggaaattttatcttgaaactgaccaaacgcttattgtgtaagataaaccagttgaatcattgaggatccaagttgagattttaattctgtgacatttttacaagggtaaaatgttaccactactttaattattgttatacacagctttatgatatcaaagactcattgcttaattctaagacttttgaattttcattttttaaaaagatgtacaaaacagtttgaaataaattttaattcgtatataaaggtgggcctttttttaatgcattggctttttgtgtagtcaggaaatataattaagctctgaaataataacttcatgtgccaatggtatgttaggagaaagatgctagcagaaagctggcttcctggctcttgagtagttataaaaatacagactttatatcagctgcccagttactgtgtgttacccaactcctgaatctaccaaaatttgataaacaatttggaaggacaaacctacattttttttttttatgagacggagtctctctcactctgtcaccaaggctggagtgcagtagtgtgatctcagctcactgcaacctctgcctcccgggtttaagcaattctctgcctcagcctcccgagtagctgggattacaggcgcgtgccaccacgcctagtgtatttttagtagagagagggtttcaccatcttggccaggctggtcttgaactctcgacctcgtgatccacctgcctcagcctcccaaagtgttgggattacagatgtgagccactgcgcccagcccctaaattgttttagtaaagaagaaagcagttgactttttagaaaaggaaatgtcttcttcctttgacacataacctcaagatggttaggttacgtgataaaaagtgaagctgcttgttactggagcctctctgaattgctggtgaccactttgcagtctgaggaagacgcaggtgcaagtaagttaccaagggtattttgttttcattccaagtctctgatgacatattccacctagctcttctagaaaagcttatttgttaactagtgttagcaaaaataaatggtgtggttaacaaatctcaggcatttgacagtagctggagaaatttgttcaaggtccacaagagatgaggctgggctacaaaaagaggcctctggccgaagatggataagagatcacaagtgaaaggtcagaagtcactaggccagactctggctacctaatccctgaattaaaaataaactcaaaatggggggaaaaaggctaagcatatagttacacaggtagtaaatacaaataaaacgatatttttgcatatttaaaatactggaagaaagtacaccaaacttgtgggtgaattatgggtggttatttaactcgtttagtgaaaagcatgtatttttatgagcaggagaaaatagtaaagatatacccacattctgcaggctaaaggagagccctgtgtgtgttttaaaagcccatgtttccagtcaaataaaaaattaccggggatgagctggtgaaatttaatcgaaaggtgatccattgtgaatgcaatgggagggaaggggcatgtgggactgtgtatcccaaaaaccctttgatagcctatgtccacagccatctctggaaaatccagtctaccatattcagtcttgagttttctctgagaaaggattccttcgtctttgcagcagcaggctaagttggtactctccacagattcttggaacaacaacccaggctctaaggaaacatctaggcactaaattgaatgaaagagtgatggctttttattcaaataaaaaaatttcaaatctgtcaaaacagcacccctcggaaaactaaaatagagatatttcaagattttataattttcaaagacctttgaaatattttaaacttgtgaaaagttacaaacctgatgtgttgtctaaaagcgtttttcaaacaagccagtagacttgaaaaatctagtctgaagcacagacttaaccaatatttgctggggatatgcccccaaatctggccataaacaaaatctctgcagtactgtgacaggttcatgatggccatgacgccatgctgaaggtttaccggaatgagagcaaggaacacctggaccacccagggcgggaaaacggcttaaaggcgttcctaaactacaaacaatagcatgagcgatctgtgccttaaggacatgttcctgctgcagataactagccagaccccatgcctttgtttcgtttgggaaggaatacttttagttaatctataatctatagaaacaatgtttatcactggcttgctgtcaataaacatgggtaaatctctgttcggggctctcagctctgaaagctgtgagtcccctgatttcccactctgcatgctatatttctgggtgtgtgtctttaatttctctagcgcctctgggttagggtctccatgaccaagctggtctcggcaaatatttcctatactcgaacatctaaattgtttgttttcttacttgaattgcaaaggaagtaaggaagggtgagatagaaatcactgagcatattaagagggaggagtttgctgatgtgggagtgtagttatgacacttgggcatcatactagaggctatggacttagcaataaggaaacatccactcagccctatgtgtggttcatgtgtatgttttgcctatgaaagttgaaactgttttctaaatgttatttccttttgtaactgataaaatttctaaaaagcaaagaagaaacttttctgtattaaaaataacaaacattagtaaatgtatatatacagtcatgtgttgcttaatgatggggatacattctgagaaatgtgtcttgggtgatttcatcgtgacgtgaacatcatagagtacactgacacaaacctagatggtatagcctattacacacctaggctatatggtacagcctgttgctcctaagctacgcacctgtgcaacacatcactgtgctgagtactgtacacagttgtaacacagtggtaagtattcgtgtatctgaacagaaaagtacagtaaaaatataggatcataattttatgggaccactatcatatatgcagtcactgaccaaaacatcacacagcacatgacttgtgtgtatggatatctcaattgtaaacaatttcacaaatgttcattatctctttttaagtaagttaataagtaaaactattactaagctgcaaaaaaaaaaaaaaaaa

SEQ ID NO: 100 - DNA, 1431 bp, Homo sapiens
ccgtgaagtgggcggagcgagcgatttgaacgcgagcggcgcggacttctgccaagcaccggctcatgtgaggctcgcggcacagcgttctctgggctccccagaagccagcctttcgctcccggacccggcagcccgagcaggagccgtgggaccgggcgccagcaccctctgcggcgtgtcatgggcccgcgccgccggagccgaaagcccgaggccccgaggaggcgcagcccgagcccgaccccgacccccggcccctcccggcggggcccctccttaggcgcttcctcccatcaacacagtcggcggagacaaggttggctaaaggagatccgaaagcttcagaagagcacacacctcttgataaggaagctgcccttcagccgcctggcaagagaaatatgtgttaaattcactcgtggtgtggacttcaattggcaagcccaggccctattggccctacaagaggcagcagaagcatttctagttcatctctttgaggacgcctatctcctcaccttacatgcaggccgagttactctcttcccaaaggatgtgcaactggcccggaggatccggggccttgaggagggactcggctgagctcctgcacccagtgtttctgtcagtctttcctgctcagccaggggggatgataccggggactctccagagccatgactagatccaatggattctgcgatgctgtctggactttgctgtctctgaacagtatgtgtgtgttgctttaaatatttttcttttttttgagaaggagaagactgcatgactttcctctgtaacagaggtaatatatgagacaatcaacaccgttccaaaggcctgaaaataattttcagataaagagactccaaggttgactttagtttgtgagttactcatgtgactatttgaggattttgaaaacatcagatttgctgtggtatgggagaaaaggctatgtacttattattttagctctttctgtaatatttacattttttaccatatgtacatttgtacttttattttacacataagggaaaaaataagaccactttgagcagttgcctggaaggctgggcatttccatcatatagacctctgcccttcagagtagcctcaccattagtggcagcatcatgtaactgagtggactgtgcttgtcaacggatgtgtagcttttcagaaacttaattggggatgaatagaaaacctgtaagctttgatgttctggttacttctagtaaattcctgtcaaaatcaattcagaaattctaacttggagaatttaacattttactcttgtaaatcatagaagatgtatcataacagttcagaattttaaagtacattttcgatgcttttatgggtatttttgtagtttctttgtagagagataataaaaatcaaaatatttaatgaaaa

SEQ ID NO: 101 - DNA, 4339 bp, Homo sapiens
agagccggaggagggggaaggagggaggggagagcggtggcggcggctgcgccgggctgtgagtctctcgccgccggaggaagatgaggctgaagattgggttcatcttacgcagtttgctggtggtgggaagcttcctggggctagtggtcctctggtcttccctgaccccgcggccggacgacccaagcccgctgagcaggatgagggaagacagagatgtcaatgaccccatgcccaaccgaggcggcaatggactagctcctggggaggacagattcaaacctgtggtaccatggcctcatgttgaaggagtagaagtggacttagagtctattagaagaataaacaaggccaaaaatgaacaagagcaccatgctggaggagattcccagaaagatatcatgcagaggcagtatctcacatttaagcctcagacattcacctaccatgatcctgtgcttcgcccagggatcctcggtaactttgaacccaaagaacctgagcctcctggagtggttggtggccctggagagaaagccaagccattggttttgggaccagaattcaaacaagcaattcaagccagcattaaagagtttggatttaacatggtggcaagtgacatgatctcactggaccgcagcgtcaatgacttacgccaagaagaatgcaagtattggcattatgatgaaaacttgctcacttcgagcgttgtcattgtcttccataatgaaggatggtcaaccctcatgagaacagtccacagtgtaattaaaaggactccaaggaaatatttagcagaaattgtgttaattgacgatttcagtaataaagaacacttaaaagaaaaactggatgaatatattaagctgtggaatggcctagtgaaggtatttcgaaatgaaagaagggaaggtttaattcaagcacgaagtattggtgctcagaaggctaaacttggacaggttttgatataccttgatgcccactgtgaggtggcagttaactggtatgcaccacttgtagctcccatatctaaggacagaaccatttgcactgtgccgcttatagatgtcataaatggcaacacatatgaaattataccccaagggggtggtgatgaagatgggtatgcccgaggagcatgggattggagtatgctctggaaacgggtgcctctgacccctcaagagaagagactgagaaagacaaaaactgaaccgtatcggtccccagccatggctgggggattatttgccattgaacgagagttcttctttgaattgggtctctatgatccaggtctccagatttggggtggtgaaaactttgagatctcatacaagatatggcagtgtggtggcaaattattatttgttccttgttctcgtgttggacatatctaccgtcttgagggctggcaaggaaatcctccgcccatttatgttgggtcttctccaactctgaagaattatgttagagttgtggaggtttggtgggatgaatataaagactacttctatgctagtcgtcctgaatcgcaggcattaccatatggggatatatcggagctgaaaaaatttcgagaagatcacaactgcaaaagttttaagtggttcatggaagaaatagcttatgatatcacctcacactaccctttgccacccaaaaatgttgactggggagaaatcagaggcttcgaaactgcttactgcattgatagcatgggaaaaacaaatggaggctttgttgaactaggaccctgccacaggatgggagggaatcagcttttcagaatcaatgaagcaaatcaactcatgcagtatgaccagtgtttgacaaagggagctgatggatcaaaagttatgattacacactgtaatctaaatgaatttaaggaatggcagtacttcaagaacctgcacagatttactcatattccttcaggaaagtgtttagatcgctcagaggtcctgcatcaagtattcatctccaattgtgactccagtaaaacgactcaaaaatgggaaatgaataacatccatagtgtttagagagaaaaaaataaaccaataacctacctactgacaagtaaatttatacaggactgaaaaccgcctgaaacctgctgcaactattgttattaactctgtatagctccaaacctggaacctcctgatcagtttgaaggacattgataaactgtgattttacaataacattatcatctgcagttactgtttacaagactgcttttaccttaaactttgtagatgtttacatctttttgttgtgttttaagatgatgttggtaatttgtgcctttagctctgttttattagacagagttaaagcatgttgtcttctttgggattacactcaggggtctgaaaggcagtttgatttttatttttaacacacttgaaaaaaggttggagtagccagactttcatatataacttggtgattatcaacctgttgtgtctttatttaattttacatctttttgaagcactgccacaggttattagccaaggtggccttccttcacagtcatgctgcttttttgaaaggtgaatttcaacacatttagtgcctctttcatttctcagtatatatttcaagagcttgtgatgaaatctataggatggtaatgatggacttgtcacctgtatggggaatacttttactactcagaaatgaatttatgtgctgccatttgctataaagttgaactttgtatggcttgaaaaagaaatgacaatatggaacatcccaaggctgtcccatagggttggaagttgtgtagcattcactcccttacctactggcattcccagtgccctctgtccatacctacttctaggattgcaaaggagtcttccaactagagaaaaattgtccactgacatttgggatttacttttctccaatacctgccaatacagaaaactattatcagttgttattgttatcccttgaaagcgagggtgacaaaaacaacaaaacaccgttataaacacatcaaaggttcattctgactgaggtaagactttccaagcccttgttagattaggccttataaaacttgtgtgcattataacctaagctgtgcaacctgtgaagccaagagtgaactgatgtttcatttatattttcatccaaatgacattatctgcacgtttttaaaatttaaaaacaaaggactatttaaaaatacagtttattaacaaacgtgaactactttctgttacattaggtgttccctagtgtttcttaatttctttttagaaagtgtatttttattagtatttttccggtgaacagaagatttgtttggatttaaacatttactaagacagtacctattaggaaaaccaaatattgcaaatggtcaattcgattttaatttctcaaaagatactctgttatccagaagattaaaatgcctacattgagtgcttaaaaaaaaaaaaacaactgtgatgatgtgagcagaatggcaagtaagttaagcatttttgatcctgtaatcatggtatcattacaatgaaaggaattcacaaactactgccagaggaagtttgttttttaatttaagagggaaatataacctataaatttgtttcttccaagcttagctcttaaatttggagactcaaagttaaacatcctcaacagagttttatttataattttgaattgtcaatttgtattttgctactgatctgtgatcaaccattttaactttcatctctagggatgtttaacatttataattgcaaaataaaccaactataaaaaaagaaactaagagagaattggtactttaattacttgtgtgtttgcaaataggctccattttccatgttgagtagattataaccttattaactatgcataggcctaagaaaggtggcaatgaactgtgcatgtaaattttaaatgggtactttgtgcaattcgttaaaagaagatactctatgaatatgattctatatattgaaatcagaaaacctaccaaacaaaaacatcagaagctgctgccataatgactattttctactgtaggctgctttggaaataattcccatatccttgctttgtaagttggtaatatcactatgcatttctacacattttataaatttgatttatgcagattttgatacactgtatgtttctgtagaaattgtataaatattcaaaattttattaggataaatttgagaaacttacgtatatcttaattctgggttgcttgttttttaggtgacaaaaataaaatattgtattttaattcaaaaaaaaaaaaaaaaaaaaaaaaaaaaaaaaa

SEQ ID NO: 102 - DNA, 1218 bp, Homo sapiens
aaaggtctaggatgacatctggtgtattgactgtggccagtcttaaagctagtttttgctatgtggaacatgctgctctaattcagatttaaagagtttcttcctgttaattcgaagctcactgtgcctcttgtttccgagggaagaaggactgattaagtcatctaaatggatgcaatactgaattacaggtcagaagatactgaagattactacacattactgggatgtgatgaactatcttcggttgaacaaatcctggcagaatttaaagtcagagctctggaatgtcacccagacaagcatcctgaaaaccccaaagctgtggagacttttcagaaactgcagaaggcaaaggagattctgaccaatgaagagagtcgagcccgctatgaccactggcgaaggagccagatgtcgatgccattccagcagtgggaagctttgaatgactcagtgaagacgtcaatgcactgggttgtcagaggtaaaaaagacctgatgctggaagaatctgacaagactcataccaccaagatggaaaatgaggaatgtaatgagcaaagagaaagaaagaaagaggagctggcttcaaccgcagagaaaacggagcagaaagaacccaagcccctagagaagtcagtctccccgcaaaattcagattcttcaggttttgcagatgtgaatggttggcaccttcgtttccgctggtccaaggatgctccctcagaactcctgaggaagttcagaaactatgaaatatgaaatatctctgcttcaaaaaatgaggaagagcaagactgtcccctatgctgccaacatgcagtctttgtttatgtcttaaaaatgtcatgtttatgtcatgtctgtgaattgctgagtactaattgattcctccatccttgaatcagttctcataatgctttttaaataagaaaaattcagaagatgaatttcttccaatatttgaataaattaaagctcttagatacagagtagattgtattatatgctttttcctattaatactacttatagaaatccattaaaaagcaatctctgtacagtgtatttaaatatttcattgacatactgtgatctctattagtgatggatgtacaaaaaatgttttcttacccttgacttacaatgaaatgtgaaattacttgtctgaaccccgtggggagaaataaataattttcccaaagttcaaaaaaa

SEQ ID NO: 103 - DNA, 3771 bp, Homo sapiens
gcgccgggacgtggccagttgcccgcctgccccggagagccaggcgctaaccagccgctctgcgccccgcgccctgcttgcccccattatccagccttgccccggcgccctgacctgacgccctggcctgacgccctgcttcgtcgcctcctttctctcccaggtgctggaccagggactgagcgtcccccggagagggtccggtgtgaccccgacaagaagcagaaatggggaagaaactggatctttccaagctcactgatgaagaggcccagcatgtcttggaagttgttcaacgagattttgacctccgaaggaaagaagaggaacggctagaggcgttgaagggcaagattaagaaggaaagctccaagagggagctgctttccgacactgcccatctgaacgagacccactgcgcccgctgcctgcagccctaccagctgcttgtgaatagcaaaaggcagtgcctggaatgtggcctcttcacctgcaaaagctgtggccgcgtccacccggaggagcagggctggatctgtgacccctgccatctggccagagtcgtgaagatcggctcactggagtggtactatgagcatgtgaaagcccgcttcaagaggttcggaagtgccaaggtcatccggtccctccacgggcggctgcagggtggagctgggcctgaactgatatctgaagagagaagtggagacagcgaccagacagatgaggatggagaacctggctcagaggcccaggcccaggcccagccctttggcagcaaaaaaaagcgcctcctctccgtccacgacttcgacttcgagggagactcagatgactccactcagcctcaaggtcactccctgcacctgtcctcagtccctgaggccagggacagcccacagtccctcacagatgagtcctgctcagagaaggcagcccctcacaaggctgagggcctggaggaggctgatactggggcctctgggtgccactcccatccggaagagcagccgaccagcatctcaccttccagacacggcgccctggctgagctctgcccgcctggaggctcccacaggatggccctggggactgctgctgcactcgggtcgaatgtcatcaggaatgagcagctgcccctgcagtacttggccgatgtggacacctctgatgaggaaagcatccgggctcacgtgatggcctcccaccattccaagcggagaggccgggcgtcttctgagagtcagatctttgagctgaataagcatatttcagctgtggaatgcctgctgacctacctggagaacacagttgtgcctcccttggccaagggtctaggtgctggagtgcgcacggaggccgatgtagaggaggaggccctgaggaggaagctggaggagctgaccagcaacgtcagtgaccaggagacctcgtccgaggaggaggaagccaaggacgaaaaggcagagcccaacagggacaaatcagttgggcctctcccccaggcggacccggaggtgggcacggctgcccatcaaaccaacagacaggaaaaaagcccccaggaccctggggaccccgtccagtacaacaggaccacagatgaggagctgtcagagctggaggacagagtggcagtgacggcctcagaagtccagcaggcagagagcgaggtttcagacattgaatccaggattgcagccctgagggccgcagggctcacggtgaagccctcgggaaagccccggaggaagtcaaacctcccgatatttctccctcgagtggctgggaaacttggcaagagaccagaggacccaaatgcagacccttcaagtgaggccaaggcaatggctgtgccctatcttctgagaagaaagttcagtaattccctgaaaagtcaaggtaaagatgatgattcttttgatcggaaatcagtgtaccgaggctcgctgacacagagaaaccccaacgcgaggaaaggaatggccagccacaccttcgcgaaacctgtggtggcccaccagtcctaacgggacaggacagagagacagagcagccctgcactgttttccctccaccacagccatcctgtccctcattggctctgtgctttccactatacacagtcaccgtcccaatgagaaacaagaaggagcaccctccacatggactcccacctgcaagtggacagcgacattcagtcctgcactgctcacctgggtttactgatgactcctggctgccccaccatcctctctgatctgtgagaaacagctaagctgctgtgacttccctttaggacaatgttgtgtaaatctttgaaggacacaccgaagacctttatactgtgatcttttacccctttcactcttggctttcttatgttgctttcatgaatggaatggaaaaaagatgactcagttaaggcaccagccatatgtgtattcttgatggtctatatcggggtgtgagcagatgtttgcgtatttcttgtgggtgtgactggatattagacatccggacaagtgactgaactaatgatctgctgaataatgaaggaggaatagacaccccagtccccaccctacgtgcacccgctctgcaagttcccatgtgatctgtagaccaggggaaattacactgcggtcaagggcagagcctgcacatgacagcaagtgagcatttgatagatgctcagatgctagtgcagagagcctgctgggagacgaagagacagcaggcagagctccagatgggcaaggaagaggcttggttctagcctggctctgcccctcactgcagtggatccagtggggcagaggacagagggtcacaaccaatgagggatgtctgccaaggatgggggtgcagaggccacaggagtcagcttgccactcgcccattggttacatagatgatctctcagacaggctgggactcagagttatttcctagtatcggtgtgccccatccagttttaagtggagccctccaagactctccagagctgcctttgaacatcctaacagtaatcacatctcaccctccctgaggttcactttagacaggacccaatggctgcactgcctttgtcagagggggtgctgagaggagtggcttcttttagaatcaaacagtagagacaagagtcaagccttgtgtcttcaagcattgaccaagttaagtgtttccttccctctctcaataagacacttccaggagctttccaatctctcacttaaaactaaggtttgaatctcaaagtgttgctgggaggctgatactcctgcaacttcaggagacctgtgagcacacattagcagctgtttctctgactccttgtggcatcagataaaaacgtgggagtttttccatataattcccagccttacttataaattctattctttgaaaaaattattcaggctaggtaaggtggctcatacctataatcccagccctttgagaggccaaggtgggagaattgcttgaggccaggagtttgagacctcctgggcaacatagtgagatcccatctctacaaaaaacaaaacaaaaaaattacccaagcatgatggtatatgcctgtagtcgtacctacttacttaggaggctgaggcaggaggatcacttgagccctggaggttggggctgcagtgagccatgatcgcatcactatactcgagcctgggcaacagagtgagaccttgtctcttaaaaaaattaataataaataaatgaaaataattcttcagaaaaaaaaaaaaaaaa

SEQ ID NO: 104 - DNA, 945 bp, Homo sapiens
atggcgcccccgcaggtcctcgcgttcgggcttctgcttgccgcggcgacggcgacttttgccgcagctcaggaagaatgtgtctgtgaaaactacaagctggccgtaaactgctttgtgaataataatcgtcaatgccagtgtacttcagttggtgcacaaaatactgtcatttgctcaaagctggctgccaaatgtttggtgatgaaggcagaaatgaatggctcaaaacttgggagaagagcaaaacctgaaggggccctccagaacaatgatgggctttatgatcctgactgcgatgagagcgggctctttaaggccaagcagtgcaacggcacctccatgtgctggtgtgtgaacactgctggggtcagaagaacagacaaggacactgaaataacctgctctgagcgagtgagaacctactggatcatcattgaactaaaacacaaagcaagagaaaaaccttatgatagtaaaagtttgcggactgcacttcagaaggagatcacaacgcgttatcaactggatccaaaatttatcacgagtattttgtatgagaataatgttatcactattgatctggttcaaaattcttctcaaaaaactcagaatgatgtggacatagctgatgtggcttattattttgaaaaagatgttaaaggtgaatccttgtttcattctaagaaaatggacctgacagtaaatggggaacaactggatctggatcctggtcaaactttaatttattatgttgatgaaaaagcacctgaattctcaatgcagggtctaaaagctggtgttattgctgttattgtggttgtggtgatagcagttgttgctggaattgttgtgctggttatttccagaaagaagagaatggcaaagtatgagaaggctgagataagggagatgggtgagatgcatagggaactcaatgcataa

SEQ ID NO: 105 - DNA, 1697 bp, Homo sapiens
gaggcgtaagccaggcgtgttaaagccggtcggaactgctccggagggcacgggctccgtaggcaccaactgcaaggacccctccccctgcgggcgctcccatggcacagttcgcgttcgagagtgacctgcactcgctgcttcagctggatgcacccatccccaatgcaccccctgcgcgctggcagcgcaaagccaaggaagccgcaggcccggccccctcacccatgcgggccgccaaccgatcccacagcgccggcaggactccgggccgaactcctggcaaatccagttccaaggttcagaccactcctagcaaacctggcggtgaccgctatatcccccatcgcagtgctgcccagatggaggtggccagcttcctcctgagcaaggagaaccagcctgaaaacagccagacgcccaccaagaaggaacatcagaaagcctgggctttgaacctgaacggttttgatgtagaggaagccaagatccttcggctcagtggaaaaccacaaaatgcgccagagggttatcagaacagactgaaagtactctacagccaaaaggccactcctggctccagccggaagacctgccgttacattccttccctgccagaccgtatcctggatgcgcctgaaatccgaaatgactattacctgaaccttgtggattggagttctgggaatgtactggccgtggcactggacaacagtgtgtacctgtggagtgcaagctctggtgacatcctgcagcttttgcaaatggagcagcctggggaatatatatcctctgtggcctggatcaaagagggcaactacttggctgtgggcaccagcagtgctgaggtgcagctatgggatgtgcagcagcagaaacggcttcgaaatatgaccagtcactctgcccgagtgggctccctaagctggaacagctatatcctgtccagtggttcacgttctggccacatccaccaccatgatgttcgggtagcagaacaccatgtggccacactgagtggccacagccaggaagtgtgtgggctgcgctgggccccagatggacgacatttggccagtggtggtaatgataacttggtcaatgtgtggcctagtgctcctggagagggtggctgggttcctctgcagacattcacccagcatcaaggggctgtcaaggccgtagcatggtgtccctggcagtccaatgtcctggcaacaggagggggcaccagtgatcgacacattcgcatctggaatgtgtgctctggggcctgtctgagtgccgtggatgcccattcccaggtgtgctccatcctctggtctccccattacaaggagctcatctcaggccatggctttgcacagaaccagctagttatttggaagtacccaaccatggccaaggtggctgaactcaaaggtcacacatcccgggtcctgagtctgaccatgagcccagatggggccacagtggcatccgcagcagcagatgagaccctgaggctatggcgctgttttgagttggaccctgcgcggcggcgggagcgggagaaggccagtgcagccaaaagcagcctcatccaccaaggcatccgctgaagaccaacccatcacctcagttgttttttatttttctaataaagtcatgtctcccttcatgttttttttttaaaaaaaaaaaaaaaaaaaaaaaaa

SEQ ID NO: 106 - DNA, 590 bp, Homo sapiens
cttctctgggacacattgccttctgttttctccagcatgcgcttgctccagctcctgttcagggccagccctgccaccctgctcctggttctctgcctgcagttgggggccaacaaagctcaggacaacactcggaagatcataataaagaattttgacattcccaagtcagtacgtccaaatgacgaagtcactgcagtgcttgcagttcaaacagaattgaaagaatgcatggtggttaaaacttacctcattagcagcatccctctacaaggtgcatttaactataagtatactgcctgcctatgtgacgacaatccaaaaaccttctactgggacttttacaccaacagaactgtgcaaattgcagccgtcgttgatgttattcgggaattaggcatctgccctgatgatgctgctgtaatccccatcaaaaacaaccggttttatactattgaaatcctaaaggtagaataatggaagccctgtctgtttgccacacccaggtgatttcctctaaagaaacttggctggaatttctgctgtggtctataaaataaacttcttaacatgcttaaaaaaaaaaaaaa

SEQ ID NO: 107 - DNA, 2838 bp, Homo sapiens
cctccgggcccgggtcggcgcgcccagcctgccagccgcgctgctgctgctcctcctgctgtgggaccgctgaccgcgcggctgctccgctctccccgctccaagcgccgatctgggcacccgccaccagcatggacgctcgccgcgtgccgcagaaagatctcagagtaaagaagaacttaaagaaattcagatatgtgaagttgatttccatggaaacctcgtcatcctctgatgacagttgtgacagctttgcttctgataattttgcaaacacgaaacctaaattcaggtcagatatcagtgaagaactggcaaatgttttttatgaggactctgataatgaatctttctgcggcttttcagaaagtgaggtgcaagatgtattagaccattgtggatttttacagaaaccaaggccagatgtcactaacgaactggccggtatttttcatgccgactctgacgatgaatcattttgcggtttctcagagagtgagatacaagatggaatgaggctgcagtcagttcgggaaggctgtaggacccgcagccagtgcaggcactctggacctctcagggtggcgatgaagtttccagcgcggagtaccaggggagcaaccaacaaaaaagcagagtcccgccagccctcagagaattctgtgactgattccaactccgattcagaagatgaaagtggaatgaattttttggagaaaagggctttaaatataaagcaaaacaaagcaatgcttgcaaaactcatgtctgaattagaaagcttccctggctcgttccgtggaagacatcccctcccaggctccgactcacaatcaaggagaccgcgaaggcgtacattcccgggtgttgcttccaggagaaaccctgaacggagagctcgtcctcttaccaggtcaaggtcccggatcctcgggtcccttgacgctctacccatggaggaggaggaggaagaggataagtacatgttggtgagaaagaggaagaccgtggatggctacatgaatgaagatgacctgcccagaagccgtcgctccagatcatccgtgacccttccgcatataattcgcccagtggaagaaattacagaggaggagttggagaacgtctgcagcaattctcgagagaagatatataaccgttcactgggctctacttgtcatcaatgccgtcagaagactattgataccaaaacaaactgcagaaacccagactgctggggcgttcgaggccagttctgtggcccctgccttcgaaaccgttatggtgaagaggtcagggatgctctgctggatccgaactggcattgcccgccttgtcgaggaatctgcaactgcagtttctgccggcagcgagatggacggtgtgcgactggggtccttgtgtatttagccaaatatcatggctttgggaatgtgcatgcctacttgaaaagcctgaaacaggaatttgaaatgcaagcataatatctggaaaatttgctgcctgccttctacttctcaaatctttcttgtaaaagtttccaattttttcactgaaacctgagttaaaaatcttgatgatcagcctgtttcataagaaactccaatcaagttaatcttagcagacatgtgtttctggagcatcacagaaggtatattgctagttacactttgccctcctgcagtttcttctctgctcccaacccccatctcacagcatccccctctatttccaatgctcctctccaaccgcttagtttctgaatttcttttaaattacagttttatgaaagcatattttatttacttggtgttgaaatagccctcataaaacctaagcacttggaaacacaataatagtattaactaactagatctattgaatttcagagaagagccttctaacttgtttacacaaaaacgagtatgatttagcattcatactagttgaaatttttaatagaatcaaggcacaaaagtcttaaaaccatgtggaaaaattaggtaattattgcagattgatgtctctcaatcccatgtattgcgcttatgttacaagttgttgtcacagttgagacttaatttctcctaatttcttctgcccgaagggtaagtggtgcgtccagcttacacaatcataattcaaaggttggtgggcaatgtaatacttaattaaaataatgatggaagagctatctggagattatgagtaagctgatttgaattttcagtataaaactttagtataattgtagtttgcaaagtttatttcagttcacatgtaaggtattgcaaataaattcttggacaattttgtatggaaacttgatattaaaaactagtctgtggttctttgcagtttcttgtaaatttataaaccaggcacaaggttcaagtttagattttaagcacttttataacaatgataagtgcctttttggagatgtaacttttagcagtttgttaacctgacatctctgccagtctagtttctgggcaggtttcctgtgtcagtattccccctcctctttgcattaatcaaggtatttggtagaggtggaatctaagtgtttgtatgtccaatttacttgcatatgtaaaccattgctgtgccattcaatgtttgatgcataattggaccttgaatcgataagtgtaaatacagcttttgatctgtaatgcttttatacaaaagtttattttaataataaaatgtttgttctaacttgtctgcttttttaaaaataatcttactgtacttaattctaattttttcctcatatttaaataaaaggccatttccaccttttcaaaaaaaaaaaaaaaaaaaaaaaaaaaa

SEQ ID NO: 108 - DNA, 654 bp, Homo sapiens
gttctggtttcatagcaacttctaggtggtgtgggcgaagtttgggactggtttagggcggggacaagaccaagaacacaagtttccttgtactacgggagagagggaggggaggaaattggagaccccagcacccccttgctcactctcttgctcacagtccacgatggcccggtccctggtgtgccttggtgtcatcatcttgctgtctgccttctccggacctggtgtcaggggtggtcctatgcccaagctggctgaccggaagctgtgtgcggaccaggagtgcagccaccctatctccatggctgtggcccttcaggactacatggcccccgactgccgattcctgaccattcaccggggccaagtggtgtatgtcttctccaagctgaagggccgtgggcggctcttctggggaggcagcgttcagggagattactatggagatctggctgctcgcctgggctatttccccagtagcattgtccgagaggaccagaccctgaaacctggcaaagtcgatgtgaagacagacaaatgggatttctactgccagtgagctcagcctaccgctggccctgccgtttcccctccttggctttatgcaaatacaatcagcccagtgcaaacggaaaaaaaaaaaaaaaaaaa

SEQ ID NO: 109 - DNA, 1820 bp, Homo sapiens
ggcgctgggcggctgcggcgcgcggtgcgcggtgcgtagtctggagctatggtggtggtggcagccgcgccgaacccggccgacgggacccctaaagttctgcttctgtcggggcagcccgcctccgccgccggagccccggccggccaggccctgccgctcatggtgccagcccagagaggggccagcccggaggcagcgagcggggggctgccccaggcgcgcaagcgacagcgcctcacgcacctgagccccgaggagaaggcgctgaggaggaaactgaaaaacagagtagcagctcagactgccagagatcgaaagaaggctcgaatgagtgagctggaacagcaagtggtagatttagaagaagagaaccaaaaacttttgctagaaaatcagcttttacgagagaaaactcatggccttgtagttgagaaccaggagttaagacagcgcttggggatggatgccctggttgctgaagaggaggcggaagccaaggggaatgaagtgaggccagtggccgggtctgctgagtccgcagcactcagactacgtgcacctctgcagcaggtgcaggcccagttgtcacccctccagaacatctccccatggattctggcggtattgactcttcagattcagagtctgatatcctgttgggcattctggacaacttggacccagtcatgttcttcaaatgcccttccccagagcctgccagcctggaggagctcccagaggtctacccagaaggacccagttccttaccagcctccctttctctgtcagtggggacgtcatcagccaagctggaagccattaatgaactaattcgttttgaccacatatataccaagcccctagtcttagagataccctctgagacagagagccaagctaatgtggtagtgaaaatcgaggaagcacctctcagcccctcagagaatgatcaccctgaattcattgtctcagtgaaggaagaacctgtagaagatgacctcgttccggagctgggtatctcaaatctgctttcatccagccactgcccaaagccatcttcctgcctactggatgcttacagtgactgtggatacgggggttccctttccccattcagtgacatgtcctctctgcttggtgtaaaccattcttgggaggacacttttgccaatgaactctttccccagctgattagtgtctaaggaatgatccaatactgttgcccttttccttgactattacactgcctggaggatagcagagaagcctgtctgtacttcattcaaaaagccaaaatagagagtatacagtcctagagaattcctctatttgttcagatctcatagatgacccccaggtattgtcttttgacatccagcagtccaaggtattgagacatattactggaagtaagaaatattactataattgagaactacagcttttaagattgtacttttatcttaaaagggtggtagttttccctaaaatacttattatgtaagggtcattagacaaatgtcttgaagtagacatggaatttatgaatggttctttatcatttctcttccccctttttggcatcctggcttgcctccagttttaggtcctttagtttgcttctgtaagcaacgggaacacctgctgagggggctctttccctcatgtatacttcaagtaagatcaagaatcttttgtgaaattatagaaatttactatgtaaatgcttgatggaattttttcctgctagtgtagcttctgaaaggtgctttctccatttatttaaaactacccatgcaattaaaaggtacaatgca

SEQ ID NO: 110 - DNA, 1683 bp, Homo sapiens
agaaacggcagtggcagcagcgtccggagcagccgcagccttctggaagctccaggcggtctttctgccgagcctcggtcccggcccccatcctccccgccccatcggttgttgtctgggcggatttaaacagtcaagtaaaatcaagctgggtaatcatggcagaaggtggatttgatccctgtgaatgtgtttgctctcatgaacatgcaatgagaagactgatcaatctgttacggcagtcccagtcctactgcacagacacagagtgtcttcaggaattaccgggaccctctggtgataatggcatcagtgttacaatgatcttggtagcctggatggttattgcattgatcttgttcttactgagacctcctaatctaagaggatccagcctacctggaaagccaaccagtcctcataatggacaagatccaccagctcctcctgtggactaactttgtgatatgggaagtgaaaatagttaacaccttgcacgaccaaacgaacgaagatgaccagagtactcttaaccccattagaactgtttttccttttgtatctgcaatatgggatggtattgttttcatgagcttctagaaatttcacttgcaagtttatttttgcttcctgtgttactgccattcctatttacagtatatttgagtgaatgattatatttttaaaaagttacatggggcttttttggttgtcctaaacttacaaacattccactcattctgtttgtaactgtgattataatttttgtgataatttctggcctgattgaaggaaatttgagaggtctgcatttatatattttaaatagatttgataggtttttaaattgctttttttcataaggtatttataaagttatttggggttgtctgggattgtgtgaaagaaaattagaaccacgctgtatttacatttaccttggtagtttatttgtggatggcagttttctgtagttttggggactgtggtagctcttggattgttttgcaaattacagctgaaatctgtgtcatggattaaactggcttatgtggctagaataggaagagagaaaaaatgaaatggttgtttactaattttatactcccattaaaaatctctaatgttaagaaaaccttaaataaacatgattgatcaatatggcagatgatttacagtccattatatgacatttgtaagccactcaacactagccttacaaggttcatgaaaggaggaaaacattaattctttctgcctttgctgatataatccacatagtaataatttaagctataatttatttttaaaatgagtgcctcttgggaagcttcttttctgttctaacagttccctgttaaaatgaaaatcttaggccagtgcagtggctcacacctgtaatctcagcactttgggaggctgaggtgggtggatcacttgaggtcaggagttcgagaccagcctggccaacatggtgaaaccctgtctctactaaaaatacagaaaaattagccagggttggtgcatgtgcctgtaatcccagctactcaggaggccaaagcaggagaattgcttgaacccgggaggtggaggttgcagtgaaccaagatcgcaccactgcattccagcctaagcaatagagcgagactccctcccaaaaaaaaaaaaaaaaaaaaaaaaaaa

SEQ ID NO: 111 - DNA, 4776 bp, Homo sapiens
cggccgcatccttgccgcccgccccggcccagccgcgtcccggagccgtcgggcatggagccgtggaagcagtgcgcgcagtggctcatccattgcaaggtgctgcccaccaaccaccgggtgacctgggactcggctcaggtgttcgaccttgcgcagaccctccgcgatggagtcctgctctgccagctgcttaacaacctccgggcgcactccatcaacctgaaggagatcaacctgaggccgcagatgtcccagtttctctgtttgaagaacataaggacatttctcacggcctgttgtgagacgtttggaatgaggaaaagtgaacttttcgaggcatttgacttgtttgatgttcgtgactttggaaaggttatagaaacattatcacgactttctcgaacacctatagcattggccacaggaatcaggcccttcccaacagaagaaagcattaatgatgaagacatctacaaaggccttcctgatttaatagatgaaacccttgtggaagatgaagaagatctctatgactgtgtttatggggaagatgaaggtggagaagtctatgaggacttaatgaaggcagaggaagcacatcagcccaaatgtccagaaaatgatatacgaagttgttgtctagcagaaattaagcagacagaagaaaaatatacagaaactttggagtcaatagaaaagtatttcatggcaccactaaaaagatttctgacagcagcagaatttgattcagtattcatcaacattcctgaacttgtaaaacttcatcggaacctaatgcaagagattcatgattccattgtaaataaaaatgaccagaacttgtaccaagtttttattaactacaaggaaagattggttatttacgggcagtactgcagtggagtggagtcagccatctctagtttagactacatttctaagacaaaagaagatgtcaaactgaaattagaggaatgttccaaaagagcaaataatgggaaatttactcttcgagacttgcttgtggttcctatgcaacgtgttttaaagtaccaccttctcctccaggaactggtcaaacataccactgatccgactgagaaggcaaatctgaaactggctcttgatgccatgaaggacttggcacaatatgtgaatgaagtgaaaagagataatgagacccttcgtgaaattaaacagtttcagctatctatagagaatttgaaccaaccagttttgctttttggacgacctcagggagatggtgaaattcgaataaccactctagacaagcataccaaacaagaaaggcatatcttcttatttgatttggcagtgatcgtatgtaagagaaaaggtgataactatgaaatgaaggaaataatagatcttcagcagtacaagatagccaataatcctacaaccgataaagaaaacaaaaagtggtcttatggcttctacctcatccatacccaaggacaaaatgggttagaattttattgcaaaacaaaagatttaaagaagaaatggctagaacagtttgaaatggctttgtctaacataagaccagactatgcagactccaatttccacgacttcaagatgcataccttcactcgagtcacatcctgcaaagtctgccagatgctcctgaggggaacattttatcaaggctatttatgttttaagtgtggagcgagagcacacaaagaatgtttgggaagagtagacaattgtggcagagttaattctggtgaacaagggacactcaaactaccagagaaacggaccaatggactgcgaagaactcctaaacaggtggatccaggtttaccaaagatgcaggtcattaggaactattctggaacaccacccccagctctgcatgaaggaccccctttacagctccaggccggggataccgttgaacttctgaaaggagatgcacacagtctgttttggcagggcagaaatttagcatctggagaggttggattttttccaagtgatgcagtcaagccttgcccatgtgtgcccaaaccagtagattattcttgccaaccctggtatgctggagcaatggaaagattgcaagcagagaccgaacttattaatagggtaaatagtacttaccttgtgaggcacaggaccaaagagtcaggagaatatgcaattagcattaagtacaataatgaagcaaagcacatcaagattttaacaagagatggcttttttcacattgcagaaaatagaaaatttaaaagtttaatggaacttgtggagtactacaagcatcattctctcaaggaagggttcagaaccttagatacaactctgcagtttccatacaaggagccagaacattcagctggacagaggggtaatagagcaggcaacagcttgttaagtccaaaagtgctgggcattgccatcgctcggtatgacttctgtgcaagagatatgagagagttgtccttgttgaaaggagatgtggtgaagatttacacaaagatgagtgcaaatggctggtggagaggagaagtaaatggcagggtgggctggtttccatccacatatgtggaagaggatgaataaattcaaatcccgtgttgcaccctgcaccaaaaatttcagagaagggataaatagaagcctgcacagcatcgtgaattaactgaagtgtttaaaaagctgcatttctggctgttcaacatcctccctccttagcccctcctaagtcttaatgctgagatttctaaagatgctggtactgacagattaatggcttgcctagagctgtgcaagaaacagcctgccagtctgtcattgtcagggaccagggcaaaaccaagagctgttcttcccagaagagccctgcaaacacattggttcgtgcttccctttacttcttctggtcagataccatgaatgccagtcatcagtaaatcttaatacacttttgctttattctcacatgccattcaccagattatttgatggtacaaagaagcagaagtgtaattttccttttcccagcatgacgaaaaattggagttctgccatttgagcagcttactggaaagatccagccttacttgtcttaaattgtccaacaaggtgactcattgcccggcaaacacttttaccctcagatgttactcatgatattataaaatatgaggccagtgctcaggtttgcatcataagtgagctatccctgaagggttttaattacttatttggtgtcctgattatatttgcaaacttctttataaaaggtgaaaaaagcacacaaaagagagggtgtcttcatattaaaccttcacaaccttcatgatttcataggattattttggaaatatagcacttgactttatgaaaggatctgggctaggtatattaagggtagttgccaataacctgaagaagctggcattgtttacagaaacagatcaagggctataatttatgtcattttatagcagcagtatctattaatacatgccttttcctcccatccacctcccccgcacacacacaaagatgacctgggacatgatttttttattcccacattttcttggagcacaaacaactttgttgaggattttggaaggaaagcacaactgggtcctttattcatttctgggacagaaagagggtcagtggacttttgtgggcctccagcttctctcagagtctccccctctgcagcccatcctgggagtgtattaactggagggaagatgggtcttgcagtacatttgttttgcccagccatcactcttttttgtgaggagcctaaatacattcttcctggggtccagagtccccattcaaggcagtcaagttaagacactaacttggccctttcctgatggaaatatttcctccatagcagaagttgtgttctgacaagactgagagagttacatgttgggaaaaaaaagaagcattaacttagtagaactgaaccaggagcattaagttctgaaattttgaatcatctctgaaatgaagcaggtgtagcctgccctctcatcaatccgtctgggtgccagaactcaaggttcagtggacacatccccctgttagagaccctcatgggctaggacttttcatctaggatagattcaagacctttacctcagaattatgtaaactgtgattgtgttttagaaaaattattatttgctaaaaccatttaagtctttgtatatgtgtaaatgatcacaaaaatgtattttataaaatgttctgtacaataaagttacacctcaaagtgtactcttggaatggattctttcctgtaaagtcttatctgcgactctgtctcgggaatgttttgtctgttgccgtcagccgaactttgttatggagggagcagcctcacacaagcagaaacactcctgtggatggtattgtagcatgtattgtttattttagtcaatagaccctctccttataaatggtgtttagtcttcctgttgcatttcatgggcctgggggtttcctagcagaggatattggagcccctttttgtgacattaccaattacatctttgtccacgtttaatactttgttttggaaaatttaaatgctgcagatttgtgtagagttctaataccaaagacagaagtaaatgttttccatatactttgtcttgcctgtatgcagccctcgtgtaatacggtgaattagagtggtatttcactttgtattattttgtaaatatgtcaatataataaatagtgactaaattgataaaaaaa

SEQ ID NO: 112 - DNA, 2285 bp, Homo sapiens
acccgcccccatctgcccaagataattttagtttccttgggcctggaatctggacacacagggctcccccccgcctctgacttctctgtccgaagtcgggacaccctcctaccacctgtagagaagcgggagtggatctgaaataaaatccaggaatctgggggttcctagacggagccagacttcggaacgggtgtcctgctactcctgctggggctcctccaggacaagggcacacaactggttccgttaagcccctctctcgctcagacgccatggagctggatctgtctccacctcatcttagcagctctccggaagacctttgcccagcccctgggacccctcctgggactccccggccccctgatacccctctgcctgaggaggtaaagaggtcccagcctctcctcatcccaaccaccggcaggaaacttcgagaggaggagaggcgtgccacctccctcccctctatccccaaccccttccctgagctctgcagtcctccctcacagagcccaattctcgggggcccctccagtgcaagggggctgctcccccgcgatgccagccgcccccatgtagtaaaggtgtacagtgaggatggggcctgcaggtctgtggaggtggcagcaggtgccacagctcgccacgtgtgtgaaatgctggtgcagcgagctcacgccttgagcgacgagacctgggggctggtggagtgccacccccacctagcactggagcggggtttggaggaccacgagtccgtggtggaagtgcaggctgcctggcccgtgggcggagatagccgcttcgtcttccggaaaaacttcgccaagtacgaactgttcaagagctccccacactccctgttcccagaaaaaatggtctccagctgtctcgatgcacacactggtatatcccatgaagacctcatccagaacttcctgaatgctggcagctttcctgagatccagggctttctgcagctgcggggttcaggacggaagctttggaaacgctttttctgcttcttgcgccgatctggcctctattactccaccaagggcacctctaaggatccgaggcacctgcagtacgtggcagatgtgaacgagtccaacgtgtacgtggtgacgcagggccgcaagctctacgggatgcccactgacttcggtttctgtgtcaagcccaacaagcttcgaaatggccacaaggggcttcggatcttctgcagtgaagatgagcagagccgcacctgctggctggctgccttccgcctcttcaagtacggggtgcagctgtacaagaattaccagcaggcacagtctcgccatctgcatccatcttgtttgggctccccacccttgagaagtgcctcagataataccctggtggccatggacttctctggccatgctgggcgtgtcattgagaacccccgggaggctctgagtgtggccctggaggaggcccaggcctggaggaagaagacaaaccaccgcctcagcctgcccatgccagcctccggcacgagcctcagtgcagccatccaccgcacccaactctggttccacgggcgcatttcccgtgaggagagccagcggcttattggacagcagggcttggtagacggcctgttcctggtccgggagagtcagcggaacccccagggctttgtcctctctttgtgccacctgcagaaagtgaagcattatctcatcctgccgagcgaggaggagggccgcctgtacttcagcatggatgatggccagacccgcttcactgacctgctgcagctcgtggagttccaccagctgaaccgcggcatcctgccgtgcttgctgcgccattgctgcacgcgggtggccctctgaccaggccgtggactggctcatgcctcagcccgccttcaggctgcccgccgcccctccacccatccagtggactctggggcgcggccacaggggacgggatgaggagcgggagggttccgccactccagttttctcctctgcttctttgcctccctcagatagaaaacagcccccactccagtccactcctgacccctctcctcaagggaaggccttgggtggccccctctccttctcctagctctggaggtgctgctctagggcagggaattatgggagaagtgggggcagcccaggcggtttcacgccccacactttgtacagaccgagaggccagttgatctgctctgttttatactagtgacaataaagattattttttgatacaaaaaaaaaaaaaaaaaaaaaaaa

SEQ ID NO: 113 - DNA, 823 bp, Homo sapiens
aaacgcgggcgggcgggcccgcagtcctgcagttgcagtcgtgttctccgagttcctgtctctctgccaacgccgcccggatggcttcccaaaaccgcgacccagccgccactagcgtcgccgccgcccgtaaaggagctgagccgagcgggggcgccgcccggggtccggtgggcaaaaggctacagcaggagctgatgaccctcatgatgtctggcgataaagggatttctgccttccctgaatcagacaaccttttcaaatgggtagggaccatccatggagcagctggaacagtatatgaagacctgaggtataagctctcgctagagttccccagtggctacccttacaatgcgcccacagtgaagttcctcacgccctgctatcaccccaacgtggacacccagggtaacatatgcctggacatcctgaaggaaaagtggtctgccctgtatgatgtcaggaccattctgctctccatccagagccttctaggagaacccaacattgatagtcccttgaacacacatgctgccgagctctggaaaaaccccacagcttttaagaagtacctgcaagaaacctactcaaagcaggtcaccagccaggagccctgacccaggctgcccagcctgtccttgtgtcgtctttttaatttttccttagatggtctgtcctttttgtgatttctgtataggactctttatcttgagctgtggtatttttgttttgtttttgtcttttaaattaagcctcggttgagcccttgtatattaaataaatgcatttttgtccttttttagacaaaaaaaaaaaaaaa

SEQ ID NO: 114 - DNA, 1509 bp, Homo sapiens
atggcggcagcggcggtgacaggccagcggcctgagaccgcggcggccgaggaggcctcgaggccgcagtgggcgccgccagaccactgccaggctcaggcggcggccgggctgggcgacggcgaggacgcaccggtgcgtccgctgtgcaagccccgcggcatctgctcgcgcgcctacttcctggtgctgatggtgttcgtgcacctgtacctgggtaacgtgctggcgctgctgctcttcgtgcactacagcaacggcgacgaaagcagcgatcccgggccccaacaccgtgcccagggccccgggcccgagcccaccttaggtcccctcacccggctggagggcatcaaggtggggcacgagcgtaaggtccagctggtcaccgacagggatcacttcatccgaaccctcagcctcaagccgctgctcttcgaaatccccggcttcctgactgatgaagagtgtcggctcatcatccatctggcgcagatgaaggggttacagcgcagccagatcctgcctactgaagagtatgaagaggcaatgagcactatgcaggtcagccagctggacctcttccggctgctggaccagaaccgtgatgggcaccttcagctccgtgaggttctggcccagactcgcctgggaaatggatggtggatgactccagagagcattcaggagatgtacgccgcgatcaaggctgaccctgatgctgacggagtgctgagtctgcaggagttctccaacatggaccttcgggacttccacaagtacatgaggagccacaaggcagagtccagtgagctggtgcggaacagccaccatacctggctctaccagggtgagggtgcccaccacatcatgcgtgccatccgccagagggtgctgcgcctcactcgcctgtcgcctgagatcgtggagctcagcgagccgctgcaggttgttcgatatggtgaggggggccactaccatgcccacgtggacagtgggcctgtgtacccagagaccatctgctcccataccaagctggtagccaacgagtctgtacccttcgagacctcctgccgctacatgacagtgctgttttatttgaacaacgtcactggtgggggcgagactgttttccctgtagcagataacagaacctacgatgaaatgagtctgattcaggatgacgtggacctccgtgacacacggaggcactgtgacaagggaaacctgcgtgtcaagccccaacagggcacagcagtcttctggtacaactacctgcctgatgggcaaggttgggtgggtgacgtagacgactactcgctgcacgggggctgcctggtcacgcgcggcaccaagtggattgccaacaactggattaatgtggaccccagccgagcgcggcaagcgctgttccaacaggagatggcccgccttgcccgagaagggggcaccgactcacagcccgagtgggctctggaccgggcctaccgcgatgcgcgcgtggaactctga

SEQ ID NO: 115 - DNA, 1613 bp, Homo sapiens
attcctgtctcagctctcactgtcaacaacatcccatcctgaagacttgcttaccacaactgagagtggggagtcagtttgaggcctagcatcacttaaacttcctccaaaggcacaaaagccagaagagaaaaatgaagacgggacattttgaaatagtcaccatgctgctggcaaccatgattctagtggacattttccaggtgaaggctgaagtgttagacatggcagataatgcatttgatgatgaatacctgaaatgtacggacaggatggaaattaaatacgttccccaactgctaaaggaggaaaaagcaagccaccagcaattagatactgtgtgggaaaatgcaaaagccaaatgggcagcccgaaagactcaaatctttctccctatgaattttaaggataaccatggaatagccctgatggcatatatttccgaagctcaagagcaaactcccttttaccatctgttcagtgaagctgtgaagatggctggccaatctcgagaagattatatctatggcttccagttcaaagctttccacttttacctcacaagagccctgcagttgctgagaaaaccttgtgaggccagttccaaaactgtggtatatagaacaagccagggcacttcatttacatttggagggctaaaccaagccaggtttggccattttaccttggcatattcagccaaacctcaggctgctaatgaccagctcactgtgttatccatctacacatgccttggagttgacattgaaaattttcttgataaagaaagtgaaagaattactttaatacctctgaatgaggtttttcaagtgtcacaggagggggctggcaataaccttatccttcaaagcataaacaagacctgcagccattatgagtgtgcatttctaggtggactaaaaaccgaaaactgtattgagaacctagaatattttcaacccatctatgtctacaaccctggtgagaaaaaccagaagcttgaagaccatagtgagaaaaactggaagcttgaagaccatggtgagaaaaaccagaagcttgaagaccatggtgtgaaaatccttgaacccacccaaatacctggaatgaaaattccagaaccttttccactacctgaagataaaagtcaaggaaatatcaacaatcctactccaggtccagttcctgttccaggtcccaaaagccatccttctgcatcctcgggcaaactgctgcttccacagtttgggatggtcatcattttaatcagtgtttctgctataaatctctttgttgctctgtagtttgatgcattgtttatctttcttattctttacttgaaataactatagggatccacaggagatcaaaaggaatgatgtattttttacgtgttggccaaagtcactggataaaatgagaattgtatatttgttattcattttgcaaattcagaaagttggtccagatatatgtcacagaacttttcacttgtatactactcttacaatggaaaaaaatcccgaaaactgtatacttctgattaaattcaataaaagattttgattagatatttcagaattgccaaaaaaaaaaaaaaaaaaaaaaaaaaa

SEQ ID NO: 116 - DNA, 2486 bp, Homo sapiens
gagatttgattcccttggcgggcggaagcggccacaacccggcgatcgaaaagattcttaggaacgccgtaccagccgcgtctctcaggacagcaggcccctgtccttctgtcgggcgccgctcagccgtgccctccgcccctcaggttctttttctaattccaaataaacttgcaagaggactatgaaagattatgatgaacttctcaaatattatgaattacatgaaactattgggacaggtggctttgcaaaggtcaaacttgcctgccatatccttactggagagatggtagctataaaaatcatggataaaaacacactagggagtgatttgccccggatcaaaacggagattgaggccttgaagaacctgagacatcagcatatatgtcaactctaccatgtgctagagacagccaacaaaatattcatggttcttgagtactgccctggaggagagctgtttgactatataatttcccaggatcgcctgtcagaagaggagacccgggttgtcttccgtcagatagtatctgctgttgcttatgtgcacagccagggctatgctcacagggacctcaagccagaaaatttgctgtttgatgaatatcataaattaaagctgattgactttggtctctgtgcaaaacccaagggtaacaaggattaccatctacagacatgctgtgggagtctggcttatgcagcacctgagttaatacaaggcaaatcatatcttggatcagaggcagatgtttggagcatgggcatactgttatatgttcttatgtgtggatttctaccatttgatgatgataatgtaatggctttatacaagaagattatgagaggaaaatatgatgttcccaagtggctctctcccagtagcattctgcttcttcaacaaatgctgcaggtggacccaaagaaacggatttctatgaaaaatctattgaaccatccctggatcatgcaagattacaactatcctgttgagtggcaaagcaagaatccttttattcacctcgatgatgattgcgtaacagaactttctgtacatcacagaaacaacaggcaaacaatggaggatttaatttcactgtggcagtatgatcacctcacggctacctatcttctgcttctagccaagaaggctcggggaaaaccagttcgtttaaggctttcttctttctcctgtggacaagccagtgctaccccattcacagacatcaagtcaaataattggagtctggaagatgtgaccgcaagtgataaaaattatgtggcgggattaatagactatgattggtgtgaagatgatttatcaacaggtgctgctactccccgaacatcacagtttaccaagtactggacagaatcaaatggggtggaatctaaatcattaactccagccttatgcagaacacctgcaaataaattaaagaacaaagaaaatgtatatactcctaagtctgctgtaaagaatgaagagtactttatgtttcctgagccaaagactccagttaataagaaccagcataagagagaaatactcactacgccaaatcgttacactacaccctcaaaagctagaaaccagtgcctgaaagaaactccaattaaaataccagtaaattcaacaggaacagacaagttaatgacaggtgtcattagccctgagaggcggtgccgctcagtggaattggatctcaaccaagcacatatggaggagactccaaaaagaaagggagccaaagtgtttgggagccttgaaagggggttggataaggttatcactgtgctcaccaggagcaaaaggaagggttctgccagagacgggcccagaagactaaagcttcactataacgtgactacaactagattagtgaatccagatcaactgttgaatgaaataatgtctattcttccaaagaagcatgttgactttgtacaaaagggttatacactgaagtgtcaaacacagtcagattttgggaaagtgacaatgcaatttgaattagaagtgtgccagcttcaaaaacccgatgtggtgggtatcaggaggcagcggcttaagggcgatgcctgggtttacaaaagattagtggaagacatcctatctagctgcaaggtataattgatggattcttccatcctgccggatgagtgtgggtgtgatacagcctacataaagactgttatgatcgctttgattttaaagttcattggaactaccaacttgtttctaaagagctatcttaagaccaatatctctttgtttttaaacaaaagatattattttgtgtatgaatctaaatcaagcccatctgtcattatgttactgtcttttttaatcatgtggttttgtatattaataattgttgactttcttagattcacttccatatgtgaatgtaagctcttaactatgtctctttgtaatgtgtaatttctttctgaaataaaaccatttgtgaatatag

SEQ ID NO: 117 - DNA, 2502 bp, Homo sapiens
attgggcggaagaccctgggccggcaggaacttgcttgtgattggatgttgtgggacggcggcttctcattcgtcagcctgtgactgtggagtttgaattgggtggcggttgactgtagagccgctctctctcactggcacagcgaggttttgctcagcccttgtctcgggaccgcaggtacgtgcctggcgacttcttcgggtggtccccgtccgccctcctcgtccctacccagtttcttgcttccctgccccatctccgccgctccccgcagcctccgccgagcgccatggctcctaggaagggcagtagtcgggtggccaagaccaactccttacggaggcggaagctcgcctcctttctgaaagacttcgaccgtgaagtggaaatacgaatcaagcaaattgagtcagacaggcagaacctcctcaaggaggtggataacctctacaacatcgagatcctgcggctccccaaggctctgcgcgagatgaactggcttgactacttcgcccttggaggaaacaaacaggccctggaagaggcggcaacagctgacctggatatcaccgaaataaacaaactaacagcagaagctattcagacacccctgaaatctgccaaaacacgaaaggtaatacaggtagatgaaatgatagtggaagaggaagaagaagaagaaaatgaacgtaagaatcttcaaactgcaagagtcaaaaggtgtcctccatccaagaagagaactcagtccatacaaggaaaaggaaaagggaaaaggtcaagccgtgctaacactgttaccccagccgtgggccgattggaggtgtccatggtcaaaccaactccaggcctgacacccaggtttgactcaagggtcttcaagacccctggcctgcgtactccagcagcaggagagcggatttacaacatctcagggaatggcagccctcttgctgacagcaaagagatcttcctcactgtgccagtgggcggcggagagagcctgcgattattggccagtgacttgcagaggcacagtattgcccagctggatccagaggccttgggaaacattaagaagctctccaaccgtctcgcccaaatctgcagcagcatacggacccacaaatgagacaccaaagttgacaggatggacttttaatgggcacttctgggaccctgaagagacttcttcccttcaggcttattgtttgagtgtgaagttccagagcaaggagccatgttcctctaagggaattcaggaattcagacgtgctagtcccacaccagttaggtagagctgtctgttcaccctcccatcccagctgatcccagtcactgcttgctggggccatgccatggaagcttcccatcagtctcccagctgaatcctccctgctctctgagctgctgccttttgcctcctgcaactcaacatcctcttcaccctgccctgcctgcagttgagggggcgaagaagaaccctgtgttctcaggaagactgcctccaccaccgctacccagagaacctctgcatctggcatttctgctctctatgcttgagaccgggaggtttaggctcagataagtgagctctgggccatgagagggtaggtccagaaggtggggggaactgtacagatcagcagagcaggacagttggcagcagtgacctcagtagggaacatgtccgtctaccctctcgcactcatgacacctccccctaccagccctcctcttcctcctcctcctcctcctgtgggaggtggtcagtgggacttagggatctttcacctgctgtgcccagtagttctgaagtctgcttgtggagcagtgttttatgtttatccctgtttactgaagaccaaatactggtttggagacaacttccatgtcttgctcttctacctccctagttagtggaaatttggataagggaactgtagggcccagattctggaggttttatgtcattggccacagaataactgtctctaagctatccatggtccagtggtccctgccaagtctgtagacttcagagagcacttctctcttatggggttcatgggaacaggggtgggtgtgacttgcttggtggcctcattccatgtgtgcctgtgcctggggcatggactttgttaagcagagtcagcagtgaggtcctcattctccagccagcctctctgccctggagaatcatgtgctatgttctaagaatttgagaactagagtcctcatccccaggcttgaaggcacatggctttctcatgtagggctctctgtggtatttgttattattttgcaacaagaccattttagtaaaacagtcctgttcaagttgtattcttttaagttcttttattctcctttccctgagatttttgtatatattgttctgagtaatggtatctttgagctgattgttctaatcagagctggtacctactttcaataaattctggttttgtgttttcttttgtaaaaaaaaaaaaaaaaaa

SEQ ID NO: 118 - DNA, 2663 bp, Homo sapiens
ggcggtttccatggtgacggcaaacaaggcccacactggacagggcagctgctgggttgctactctcgcctccgccatgattccgcccgcagactctttgctcaagtacgacaccccagtgctggtgagccggaacacggagaaacggagccccaaggctcggctactgaaagtcagcccccagcagcctggaccttcaggttcagccccacagccacccaagaccaagctcccctcaactccctgtgtcccagatcctacaaagcaggcagaagaaatcttgaatgccatactacccccaagggagtgggtggaagacacgcagctatggatccagcaggtgtccagcacccctagcaccaggatggacgtggtgcacctccaggagcagttagacttaaagctgcagcagcggcaggccagggaaacaggcatctgccctgtccgcagggaactctactcacagtgttttgatgagttgatccgggaggtcaccatcaactgtgcggagagggggctgctgctgctgcgagtccgggacgagatccgcatgaccatcgctgcctaccagaccctgtacgagagcagcgtggcgtttggcatgaggaaggcactgcaggctgagcaggggaagtcagacatggagaggaaaatcgcagaattggagacggaaaagagagacctggagaggcaagtgaacgagcagaaggcaaaatgtgaagccactgagaagcgggagagcgagaggcggcaggtggaggagaagaagcacaatgaggagattcagttcctgaagcgaacaaatcagcagctgaaggcccaactggaaggcattattgcaccaaagaagtgataatttccacatgattaatttccaacaagacacttgggagttatttactgtgttcctctggcagccaataaaatcatcataagccctttgtaataaaaagctagtttcctgagtgaacaagccataacctcccctaaacaccacctaggtatttgttagaagtcacactattactccaatgtcatcagacacctaaggtctgccagccaggctcctggctgggcaatggaagatggtgtggccctgttagtctccgtgtgtggcttactagccagccttgggaactgccaactcaaattctaagaaagccactgctttctcatcatcactctataccaatacttatttctggccaaatgaatctgcttctctgcccctcaaacttttagttcacaattcatcttctaccttaacttgggcttcttgggcctctggccttccttacttaatgtcttcttttccctactctaatgcatttctaactcactttggagctttggttttctaatgtattatccccacttgccagtcaactggaccccttcctcctcggtttcagactgcctacattaggaaacaatggcagtcaaacccatggctttggagaaagtaaatgtttgccagaaaggaatactagtcacagtggcctttgtgagttgtctgcaactcagctcttcccccagcacagatctgttccccttatcctgcagaaaatcaagccctgactctgcactccccgaagtagtgatgttaattaacaactgaagaggtaactaaatctcacatgcaggtctaatgactaataattggagtacggctgctagacaactgcattttagtatttctcttccattctcctggttttgtagacccagaagattgaatgagtgacataaatctttagttcggggcaagccagggtgggctagggtggtaagctggaggacttcatccttcagttaggctgcacaagtaacattacctaaaaggcactaacatgctcaggttccccagaaagaggcgtaagaagggcctctccttagcagagcttccacctgccatccgtcttgggttcagtgagcttcaaggctcacaatggaagcactgtcatttccccagaaaagctgtgttccctatgctgaacacaccatacacattctcatctggaatctaaggagcagcttttaccctgatccagtatcctgaggaattttaagcctccactcaaatgacctgcctgtgttgtcatttccatgggaaagaactctttccacgagatctgctagttccaggcctctaagacaggaacgtatgtgccataagtgggtctacttcacagactcaatgaggcagaaattattgtagttttctcctatttcttctgcacccaactttctccttgtatttcaaaggccaggccatgtacactaacgtccttgaaatttgcagttctgtatgcttctattccaaatcattcattaccaataaaaacgaaataccaccctttccattttatagacctcatcccctatttctgtcagacagttatatgacagggtgactgtggaacctcttagttcatccaaagtctacctgaagtgctagactttcagactcttatcactgaaatccttaaggttgaggaggctttatttccctagcactggtgaagggcttcaactgtcaaacctcagaacaaatgcattagggccttagaaatgtcaatggggcaggaagaaaacacaatttctaactgcctgtttttgtataatttaataaaaaccttttaaacattaaaaaaaaaaaaaaa

SEQ ID NO: 119 - DNA, 3553 bp, Homo sapiens
gaaagcgaagcagaagccgtagaatcagcggcgagcctgttgaaagaacccacaggtgcatttcacagcactctgggcgaaaattggatgtgaaaatgaagccagaccgagatactctggatgaatattttgaatatgatgcagaggagttcttggtctctttggccttgctgataacagaaggacgaacacctgaatgttctgtaaaaggtcgaacagaaagctttcattgccctccagcacagtcttgttacccagtaactaccaaacatgaatgtagtgacaagctggcccagtgccgccaagccagacgaactaggtctgaggtcacattgttgtggaagaataaccttccaatcatggtggaaatgatgctactaccagactgctgctacagcgatgatgggcccaccacagagggaattgatctaaatgatcctgcgattaagcaagatgcattattattagaaagatggatcttggagccagttcctcgacagaatggtgaccgatttattgaagagaagacgcttctgttggctgtccgctcatttgtgtttttttctcagttaagtgcatggctgagtgtttctcatggtgctattccacgaaatattctctacagaatcagtgctgctgatgtagacctacagtggaatttttcacagactccaattgagcatgtgtttcctgttcccaatgtttctcacaatgttgccttgaaagtcagtgttcagtccttgcccagacaatctaattatccagttttgacgtgcagtattcacactaatattggcctttatgagaaaagaattcaacaacataaacttaaaactcatcagcaccataacccaaatgaagcagaacaatgtggtacaaacagttcacagcgtctgtgtagcaaacaaacttggaccatggcacctgaaagtgtgttacatgcaaaaagtggcccaagtccagaatatactgcagctgtcaaaaatatcaaactatatccaggcactggcagtaaatctgaccatgggacatctcaagccaatattctaggctttagtggtataggtgatataaaatcacaagaaacatcagtgagaactttaaaatcattttcaatggttgattccagtatctctaaccgccagagtttctggcagtcagctggtgagactaaccctttaataggctctttaattcaggagcggcaagaaatcattgcaagaattgcccaacatttgattcattgtgatccaagcacttcacatgtttctggacgtccatttaatactcaggagtctagttcactccattcaaaacttttccgggtttcacaagaaaatgagaacgtgggaaaaggtaaagaagctttctccatgacttttggtagtccagagtttagttccccagaagacaccaatgaggggaaaattcgactaaaaccagaaactcctcgaagtgaaacttgtatttctaatgacttttattctcatatgcctgttggagagactaatcctttgataggctctttactccaggagcggcaagatgttattgcaaggattgctcaacacttggagcacattgatccaacagcatcacatatcccccggcagtcattcaacatgcatgactccagttcggttgcatctaaagtgtttaggagttcatatgaagacaaaaatttgttgaagaaaaataaggatgagtcctcagtttccatttctcacacaaaatgttccttgttaggagacatcagtgatgggaaaaacttagtacctaataaatgttttacttcttttaaaaataatagtaaagaaaagtgttctttgaaacatcaaacaagaaatcagtgtcagaacaatcctagtgaaatcatccaaagtacgtatcaggagacacagaacaaaagttctagtttatcggcttcctcaattttgtctcagcacaaagaaaataacttagatttgacaagcagattcaaggagcaagaaatgagcaatggaattgataaacagtattcaaattgcaccactattgacaaacagatttgtacaaataagtataaggaaaaaataataaatgagaactataatccaaaattctttggcaatcttcagtctgatgattccaaaaaaaatgactcaaaaataaaagttactgtgttggaaatgtctgaatatttgaacaaatatgaaagcatgtcctcaaataaagactcaaaaaggcctaagacatgtgagcaaaatactcaacttaatagcatagagaattatctcaataaagataatgaaggtttcaaatgtaaaaagtcagaccaattaaaaaatgaacaagataagcaagaagatccaactaatgaaaaatcccaaaactattctcagagaagaagtataaaagactgtttgtctacatgtgagcaaccaaaaaatacagaggtattgaggactacactgaaacattcaaatgtgtggcgaaaacataattttcattccttggatggaacttcaaccagagcctttcatcctcaaactggattgcctcttctttcaagccctgttcctcaaagaaaaacacaatcaggttgctttgatctggattcttcattactacatctgaaaagcttctcatctagaagtcctcgaccatgtttaaacattgaagatgatccagatattcatgaaaaaccatttttgagttctagtgctccacctataacaagtcttagtctcctaggaaattttgaggaatctgtcttgaactatcgtttcgatcctctcggcattgttgatggttttactgccgaggtaggggcaagtggtgctttctgccccacacatttgactcttccagttgaagtgtcattctacagtgtttcagatgacaatgctccctctccttatatgggtgtgattactttagagtcccttggtaaaaggggttatcgagtacctccttcaggaacaatacaagtgaccttatttaatcctaataagactgtggtgaagatgtttgttgtgatatatgatttacgagatatgccagccaatcatcagacattcctacgacaaagaactttttctgtacctgttaaacaagaagtgaagagaagtgttaataaagagaacatccgacacacagaagaacggttattacgctacctcatacatctgaggttccagagttctaaatctggaaagatctacctccatagagacgtacggctcctgttctctagaaagtcaatggaggttgatagcggtgctgcatatgaactcaaatcttacactgaatcaccaacaaaccctcagttttcaccaagatgttgataaggagtgatgatttaaagtatttactcagtacccaagtttgcaagtaaaaattagcatagaatggagtgtaccaaattaacaatcaggagagtggattctctcctgttatcctggaccagtttttatgaaaggattcctgaaatgaaatccatatattccatgtagactggaaaaactcatgtcctaatcctttttgtactgttgaaaccacttcattggacatg

SEQ ID NO: 120 - DNA, 9145 bp, Homo sapiens
gacttgaacgcaactcccaattgcagaaaattggcaacgtctctgaagagcccttgcttttgcctggacccccagcatcatggtttcccatttcatggggtctctcagtgtcctgtgtttccttctgctgcttggattccagttcgtctgcccacagccctccactcaacacaggaaggtcccgcagcggatggcggcggagggcgcccccgaggacgacggcggcggcggcgccccgggagtgtggggcgcctggggcccctggtcggcctgctcgcgtagctgcagcggcggcgtgatggagcagacgcggccctgcctgccccgctcctaccgcctgcgcggcggccagcggcctggcgcccctgcgcgcgccttcgcggaccacgtggtgtcggcggtgcgcacgtcggtgccactgcaccggagccgcgacgagacgccagcgctggccggtacggacgccagccgccagggccccacggtgctgcgaggcagccggcacccacagccccagggcctcgaagtcactggggacagaaggagcaggacccgtggtaccattggccctggcaagtatggctatggtaaggccccatatatcttaccactgcagacagacactgcacacacgccacagaggctccggagacagaagctctcatcccgccattccaggtcccagggagcatcttctgctaggcatggctacagttcaccagcccaccaggtcccccaacatgggcctttgtaccaaagtgacagtggccctcgctctggactgcaggctgcggaggcccccatctaccagctacctttgacccatgatcaaggctaccctgcagcttcaagtctctttcacagcccagaaacaagcaacaaccacggtgtggggacccatggggcaactcagagcttctctcagcctgcccgatctacagcaatctcatgcatcggggcctatcggcagtacaagctgtgcaacaccaacgtatgtccagaaagcagtagaagtatccgggaggtacagtgtgcatcctacaacaacaagccattcatgggccggttttatgagtgggaaccatttgcagaagtaaaaggcaatcgcaaatgtgagttgaactgccaggcaatgggctaccgcttctatgtacggcaagctgagaaagtcatcgatggcaccccctgtgaccagaacggcacggccatctgtgtgtctgggcagtgcaagagcattggctgtgatgactacttaggctccgacaaagtcgtggacaaatgtggggtgtgtggaggagacaacacgggctgtcaggttgtgtcgggcgtgtttaagcatgccctcaccagcctgggctaccaccgcgtcgtggagattcccgagggagccacgaaaatcaacatcacggagatgtacaagagcaacaactatttggccctgagaagtcgttctggacgctccatcatcaatgggaactgggcaattgatcgaccaggaaaatacgagggcggagggaccatgttcacctacaagcgtccaaatgagatttcgagcactgccggagagtcctttttggcggaaggtcccaccaacgagatcttggatgtctacatgatacaccagcagccaaacccaggcgtgcactacgagtacgtgatcatggggaccaacgccatcagcccccaggtgccaccccacaggagaccaggggaacccttcaatggccagatggtgacagaaggcaggagccaggaggagggagaacagaaagggaggaacgaggagaaggaagacttgcgtggggaggcccctgagatgttcacctcagaatcggcacagaccttcccagtcaggcatccagacagattttctccccatcgaccggacaacttggtgccaccagcaccgcagcccccacggcgcagccgggatcacaactggaagcagcttgggacaacagaatgttccacgacctgtgggaaaggatcgcagtaccctattttccgctgtgtgcacagaagcactcatgaagaggctcctgagagttactgtgactccagcatgaagccgacccccgaggaggagccctgcaacatcttcccttgcccagccttctgggacatcggggagtggtctgagtgcagcaagacctgtggcctgggcatgcagcaccgccaggttctgtgccgccaggtgtacgccaaccgcagcctgacggtgcagccctaccgctgccagcacctggagaaacctgagaccaccagcacctgccaactcaagatctgcagcgagtggcagatccggaccgactggacctcgtgctcggtgccctgcggcgtgggacagaggacccgtgatgtgaagtgtgtgagcaacattggggatgtggttgacgatgaggaatgcaacatgaagctccggccgaatgacattgagaactgcgacatgggaccctgtgccaagagctggttcctcaccgagtggagcgaaaggtgctcagcggagtgtggggccggagtgcggacacgctcggtggtgtgcatgaccaaccatgtcagcagcctgcccctggagggctgtgggaacaaccggccggcagaggccaccccatgtgacaacggaccctgcacgggcaaggtggagtggtttgccgggagctggagtcagtgttccatcgagtgtgggagcgggacgcaacagagggaggtgatttgtgttagaaagaatgcagacacctttgaagtgttggacccctctgaatgttctttcctggagaaaccccccagccagcaatcctgccacctcaagccttgcggagccaaatggtttagcaccgaatggagcatgtgttccaagagctgccagggtggctttcgggtccgggaagtgcggtgtctgtctgatgacatgactctaagtaacctctgtgaccctcagttgaaaccagaagagagagaatcttgtaaccctcaggactgtgtccctgaagttgatgaaaactgcaaggacaagtactacaactgcaacgtggtggtccaggcaagactctgtgtctacaactactacaagaccgcctgctgtgcctcctgcacccgtgtggccaacaggcagacgggcttcctggggagcagataacactcctgcacccccatcagtagggcagcatcactgccttcccgggggcttcagcagtgcgcctggctggctgctgctccaccacgggccccctggcccaggcgctgccaaccaacttagtcaccacccctgcctccggtgaatgcaccccgtggtacccaggggctttttacacaagatgtttgaaagccacagtcagtcctttaagcatcaccatgtactgatgatcccctccttggacctggcatctgctaatggtgccctttgaaagtcaagcagtgggaagtacatggagctctcagccctgctcccatctggcaccttcaagtcagcagatgggccactgactgagcactgccccgtccctggtgctactggtctttctaaacttagcaccctggagagtccaaggaggcagcgcccccaacccagcgccccactaagccttgctgacacgcgtgcatccctctgtgacctcagcccagatgtgcctgttttcattctcaaagacattagactgttttcctgccctatgacacagatagctcacatgaatattgtgctttatttagcaggtgtactcacagatactagctccttagcagctcacaacatcccagaatgggaggcagggggtgactcattatccccattttactgacagggaaactgaggctcaacttaagtaattgacctgccaggtatattcacccatccagtggaagagctgagtccccgccccagtcatctaccagtatccagcctggggcctgtacttagatgtgaaaggtgctgcttcatttctgaccaagagactgagaagtttcccagaatgcaaacaaagcccaggcccctgaaatctttccggtcaagcctttatcccagcactcagttgttttggatgtctgttcctacttgcccttacccccaaagttacagatcctagttacaggactctgccagctttgttaaactgtccgtgagacaagaaagccattggggaaaccaggtgattgcctgaaattcttactccgttccaagtgctgttcctcccaggaaatcaaaggccagggtccttatggccgtggagccttcccgaccacagagccaacttgtgaagcacacagctctgcagcctgggctctgccctgcctcagccgcctcccccacgctcttcaccacgttcctggagagtccggccaacctgtcccagccgaaacactgctgtattagaaaaagtctctttctggtctttctggttttgtttatgaatttccctctgtggccacaaattcctcccctcccccatgactcacagtccatatggcccacccccagacttgagcaccaagctctgcattaatgcagttggcctgcgacaaggagctgtggacccttccccatctcttccaattcactttccccaactatccagttccagaggccgcaggcctggaaggatgcagtgcatattgaaaggtggaccctctgaaaacagttaagaggaatatatgtatgttttacccattaagaaaaaatggcaagctaaacaaatgttaaacttacagaaaatttgtcttatggtcctgagcatatttcccttttagagcaagcctggattcttagcaaagtgtttcccccatttgctcttttagctgacaaatctgccactgtgatgatggtttgcagcttttggaagcagtatggcaacctggcctgacatgctctttaggcttccactaacctggggctttcagaaattctatttggcctttctgtgggtagctttccagcttctcttctagggagccccaggcatcatttcccaaaagcatccccatctcctgattctcttggaactcctacagataagcatcctggcagaggcccaggctcccaaaccgacaaagtgaaaagagaccagagaggccaagcatattgactggtgctgttcagggcctgctcttttccactcaccacttgttttgctgcttgtcacgaggagagttgttcctgtatgtggctgctctcagatctttccaagcaagccagtcatttgaagaggttttcttttcatgctggagggcaggctaagatcaatgagtggaagagagaaaggctgttttagctcaagttaaaggaacaccttctagccatcaaagccgcccaacagaggcaagggccaccacacatgagagagcgctctgtccttaaagggaattctctgttgagtgggaggtgaacaccctggttcttccaactcaggaattctcgtggctgggctgggtcagtgatggctttgtctctttatgtctaaagtgccctatggctgctgaaggttacctaaccattctttaaaaggagaatgaccctccatgggaatggccagcctgccaactgtgcaattgaagaagacccgatggatcaaccccatgtctcccttggggagaaagtgcataaaccaggggtctctttttttttttcaacaaaccattgagctgttcttggagttcatctctggagaggttatacattattagaagtttgattattattatagtttgatcaatttatttgtcttagagatccaatttttactaattccctagttttttatttcagcatctgaatgtctttctccctagcacagtgcatacaatcagggccttgggtatttccagtgataactttccttggagaggatctaagaaaagcccagatttcggtagccatctccctccaaatatgtctctttctgctttcttagtgcccattatttccccctctcctttcttctgtcactgccatctccttcttggtcttcccattgttctttaactggccgtaatgtggaattgatatttacattttgatacggtttttttcttggcctgtgtacgggattgcctcatttcctgctctgaattttaaaattagatattaaagctgtcatatggtttcctcacaaaagtcaacaaagtccaaacaaaaatagtttgccgttttactttcatccattgaaaaaggaaattgtgcctcttgcagcctaggcaaaggacatttagtactatcgattctttccaccctcacgatgacttgcggttctctctgtagaaaagggatggcctaagaaatacaactaaaaaaacaaacaaaaacaccaaaagaaaaaaaaaagccatttaaagccagccactagagggagtcagttcagttccgtaaaggtatgctcagtgcccgctgcctgcaagctgttggggaccccagggagggcaaggcagcctgtccccgcccccagggaactagaacatgacaagaattctccgcactgtgcctacctgtccctttaccttacctctctggcccagagttcttggagggttttttctttattttcttatgtactcatctacttattctcaaagtatttagcattcaacactctttttgctttaaaaagaatggccttacaaagggacagaaaagagaagacacgagcttggtgtattttcatcaagttatgtggcagagaaatccagatattaccaggacctgtctaaacaaatgttgtgggttttcttttcattcggatagccactttatagttggaatatcaattctaatgaggaggaagacataaatataagtggtaaaaagaaacatgacttcccttaaaacaggctggataatctatatcagccttgtgggtggagactagtatttgatccttgccatataaaacattttaatatggtttacatgggaaaatatcgatggcttcctcacaaaatgtatgggtgacgtgaagttgaagagccaatggcttgggtgacacgtgctggatccaaaaagatcagggagactagaataaaacttggatgttaaaaattcaccaggaatccacataaagtactatatttgggctaaaatgaaaaactaaatacaaggtgggagagaggcaagaatttcagttgactaagctcagtgtgagtcaaagtgggatggaaccatgcaaaaacaaaacccacagacatgcaggctacgtgaggagaaaacagtggtgaggatcacatcacattgtgtttgcatttgccggaaccatactttaagaagaaaaccgatcatctataataacatcagtttatcaatgccccgtcctgatgaagtgtgcagactctcagaaacagcaggaaggacttcatgagaaccctcaggctggagaaggcactagggcacaaggagagctctcctaggaccaggaccaagaagctacaggcaggcacagtttagctcctgcagagacccagcttttcacaagttggagccttccagagatagagggactgtggtaggtggtgacccacccatcactggaggtggaagcagaggccgtttgccagggatgctggagaggggattcaagcatctggctgggcaacgtgatgctcagggccgtctccactcagggcttaggggagtctgtgagtagaagagctttaggtgatttgtttggtgggggaaggcaagtacacagctatgcactttccgtttctgacttttgccaccctgtcagccatggggagcccactgtgggactgaaaccctgagctgaatgcggcctcatgtctcagagaaacactggcaagttggtcagagccgccgtctgcatcgaggcgtagctgagcggcaggatggggggctgcctgcccagggtctctcaccgtggtgtaagcagagccatggcttgcctaggaccctatagataccatcactctttctcagctcgactggagtttctgcacctttgcaggggcaaagtaactccctgcaccctgaaccaccccccattcctgttcatttcagcagataatgatggagggggggggtgtccatcgtgctgagggtgtgaccgcaagagggtgaaaacttccagccaactttctcagtcctttctcttgcgagagggaagccacctgctatacaaactaataccccctgccttgaccccttccccacgactcagttgacagaaggatatactttgttataacttattattttgttctctgtaaatacaagatgtttataggaaatatgtattctgaactctatctgcagaatgagtcactacaccaaaatagttctattatttagaatgtgttaattttaaagggacctgataggtatttatttacatatgcgatccacatttgtgtgaaagcatgtgatcatactaacccagcctcctggaatgtcgctgtacgatgattgatgtctttttctcagtccatagttacaattgtttagtatgctaatcagtccagttccctgaggtttaagatcaaatataaattactctgcttttcgactcattcaggtagcattgtacctgaacctgattgctactttttcatcttaaatattatatttcctcatctaatctgccttcccctcatccacagacatttggagaaggaaatgggagggtgtctgttatccctttctctttgctttgtccccgttgttagactggcagcgtcagttgctcggtgggcttggttagagccgtgggtgaggcaggtggctggcggggacagggagaggctgagagggaagtggtggcatttactgctctgacacttccactgtccctgctggggatgctggggccaaggcctgtggggcctgtgaactgcacagccaggagcaaggaacccactaaatactccgtcacctccatgtcccctctacagtgttaaattattacataagcaggtgaaaggtagaaggcgaattatgtgagtaaatatggtctgttttctcttcagcaaaaatgactatttttgtgtgtgactaatttatttttattattgtaaagatacaataaaccggttgaaatatctgctttgttgacaagcgtgtgctttctctggccttattcgcgttctgttctcctgcaaatagcgccctctaaaaagaagagtcagacaataaactggttgaaatatc

SEQ ID NO: 121 - DNA, 1485 bp, Homo sapiens
tccggggcgggggcggggcctcactctgcgatataactcgggtcgcgcggctcgcgcaggccgccaccgtcgtccgcaaagcctgagtcctgtcctttctctctccccggacagcatgagcttcaccactcgctccaccttctccaccaactaccggtccctgggctctgtccaggcgcccagctacggcgcccggccggtcagcagcgcggccagcgtctatgcaggcgctgggggctctggttcccggatctccgtgtcccgctccaccagcttcaggggcggcatggggtccgggggcctggccaccgggatagccgggggtctggcaggaatgggaggcatccagaacgagaaggagaccatgcaaagcctgaacgaccgcctggcctcttacctggacagagtgaggagcctggagaccgagaaccggaggctggagagcaaaatccgggagcacttggagaagaagggaccccaggtcagagactggagccattacttcaagatcatcgaggacctgagggctcagatcttcgcaaatactgtggacaatgcccgcatcgttctgcagattgacaatgcccgtcttgctgctgatgactttagagtcaagtatgagacagagctggccatgcgccagtctgtggagaacgacatccatgggctccgcaaggtcattgatgacaccaatatcacacgactgcagctggagacagagatcgaggctctcaaggaggagctgctcttcatgaagaagaaccacgaagaggaagtaaaaggcctacaagcccagattgccagctctgggttgaccgtggaggtagatgcccccaaatctcaggacctcgccaagatcatggcagacatccgggcccaatatgacgagctggctcggaagaaccgagaggagctagacaagtactggtctcagcagattgaggagagcaccacagtggtcaccacacagtctgctgaggttggagctgctgagacgacgctcacagagctgagacgtacagtccagtccttggagatcgacctggactccatgagaaatctgaaggccagcttggagaacagcctgagggaggtggaggcccgctacgccctacagatggagcagctcaacgggatcctgctgcaccttgagtcagagctggcacagacccgggcagagggacagcgccaggcccaggagtatgaggccctgctgaacatcaaggtcaagctggaggctgagatcgccacctaccgccgcctgctggaagatggcgaggactttaatcttggtgatgccttggacagcagcaactccatgcaaaccatccaaaagaccaccacccgccggatagtggatggcaaagtggtgtctgagaccaatgacaccaaagttctgaggcattaagccagcagaagcagggtaccctttggggagcaggaggccaataaaaagttcagagttcaaaaaaaaaaaaaaaaaaa

SEQ ID NO: 122 - DNA, 6975 bp, Homo sapiens
aactcgggaacgggaacaggaggccgttggaaaactttgggcaagatggcccggcggtgatttccgcggcggtctctcctgcgcccggcctctgcggcgcaggcccagcccccgagcctcgcacgttcggcagccccggcctggccccggcccctcctgcccatggcggtggccgagctgtacacgcagtacaacagggtctggattcccgatcctgaagaagtttggaagtctgctgaaatagccaaggactacagagttggtgacaaggtcctgcgactcctgctggaggatggaacggagctggattattctgtcaatccagaatctctgcctccacttcggaatcctgacatcctcgtgggcgagaatgacctcacggctctcagctatcttcacgagcccgcggtgctccacaacctcagaatccgctttgcagaatccaaactcatttacacctacagtggaatcattttggtggccatgaatccttacaagcagttgccaatatacggagatgccatcatccacgcctacagcgggcagaacatgggcgatatggacccacacatatttgccgtggcagaagaggcatacaagcagatggccagaaacaacagaaaccagtccataattgtaagtggggagtcaggtgctggaaagacagtgtcggctcgctatgccatgaggtactttgccaccgtcagcaaatcgggcagcaacgctcacgtggaagacaaggtcctggcatccaatcccatcaccgaggccgttggaaatgccaagaccacccgcaatgacaatagtagtcggtttgggaaatacacagaaatcagttttgatgaacaaaatcaaattataggagccaacatgagcacttacctcctggagaaatccagagttgtctttcaatcggaaaatgaacgaaattaccacattttctatcagctttgtgcatctgcacagcagtcggaatttaaacatcttaaattggggagtgccgaagaatttaattatacaagaatgggaggcaatactgtcattgagggtgtgaatgatcgagctgaaatggtagagactcaaaagaccttcacgcttctgggtttcaaggaggattttcagatggacgtttttaaaatcctggcagccatcctacatctgggcaatgtgcagatcaccgcggtgggcaacgagaggtcctcagttagtgaggatgacagtcacctgaaggtgttctgtgagctcctgggcctggagagtggcagagttgctcagtggctgtgcaatcgcaaaatcgtcacaagctctgagacggtggtaaaacccatgaccaggcctcaggctgtcaacgccagggatgcactggccaaaaagatctatgctcacctgttcgacttcattgtggagagaattaaccaagcgttgcagttttcaggcaagcagcacacttttattggtgttttggacatttatggttttgaaacctttgatgtgaacagctttgaacaattttgcatcaattacgctaatgaaaaactgcaacaacagtttaacatgcatgtcttcaaactggaacaagaagaatacatgaaggaagatataccttggacgctgatagatttttatgacaatcaaccagttattgacctgattgaagcaaaaatgggaattctggagttactggatgaagaatgtttgttaccacatggaactgatgaaaactggcttcaaaagctgtataataattttgtcaacaggaaccctttgtttgaaaagcctagaatgtcaaacacatcctttgtcatccagcactttgctgataaggtagagtataaatgtgaaggtttcctggagaaaaacagagacaccgtctatgacatgctggttgaaatcctgagagcaagcaagtttcatctctgtgccaacttttttcaagaaaatccaactcctccttctccttttggttcaatgattacagttaaatctgcaaagcaagtcatcaagccaaacagcaagcatttccggaccacagttgggagcaagttccgcagctctctgtacttgctcatggagaccctcaatgcgacgacgccccactacgttcgatgcatcaagccaaatgatgagaagttaccctttgaatttgactccaaaagaattgttcagcagctgcgagcctgcggcgttttagaaacgattcgcattagtgcacagagctacccttccaggtggacatacatcgagttctacagtcgctacggcattctcatgaccaagcaagagctttccttcagcgataaaaaggaggtgtgcaaggtggttttacacagactcatccaggattctaatcagtaccagtttggtaaaaccaaaattttcttcagagcaggacaagtggcttatttagagaaacttcgattggataaactgaggcagagttgtgttatggtacaaaagcacatgcgtggctggctccagaggaaaaaattcctccgagagagacgagccgccctgataatccagcagtacttccggggtcagcaaactgtgaggaaagctattactgcagtggccttaaaagaagcttgggcagccataatcattcagaagcactgccgcgggtatcttgttcgcagcctgtatcagttgattcgcatggccaccatcacaatgcaggcctacagccgaggattcctggcaaggaggaggtatcgaaagatgctggaggaacataaggctgtgatcctacagaaatacgcacgggcgtggctggccagacgcagattccagagtatccgacgattcgtgcttaatattcagcttacttacagggtccagcgtttgcagaaaaagttggaagatcagaacaaagaaaaccatgggctggtggagaagctgactagcctggctgctcttcgagctggggatgtggaaaagattcagaagctggaagcagaactagaaaaagcagccactcacaggcgaaattacgaggagaaggggaagagatacagggatgctgtggaagagaaattggcaaagcttcagaagcataattcagaactggaaacacagaaagaacaaatacagctgaagcttcaagagaagactgaagagttaaaagaaaaaatggacaacctcaccaagcagctctttgatgatgtacaaaaggaagaacggcaaagaatgcttcttgaaaaaagttttgaactgaaaacacaagactatgagaagcagattcagtctttgaaagaagaaattaaagctctcaaggatgagaagatgcaactccaacacctggtggagggggagcacgtcacttctgatggcttgaaggcggaagtggcccgcctgagcaagcaggtcaagacaatctctgagttcgaaaaagagatagaactacttcaggcacagaagatagatgtggagaaacatgtgcagtcacaaaaacgggaaatgagagaaaagatgtcagagatcaccaaacaacttctcgaaagctatgacattgaagatgtaagaagcaggctctctgtggaagatctggaacatttaaatgaggatggagaactttggtttgcttatgaaggactaaagaaagcaacacgtgttttggagagccatttccagtctcagaaggattgctatgaaaaggagattgaagctttgaacttcaaagtggtgcatctcagtcaagaaatcaaccacctgcagaagttattcagagaagaaaatgacatcaatgaaagcatccgtcatgaagttaccaggctaacatcagagaacatgatgatcccagactttaaacagcaaatttcagaattggagaaacagaagcaagatcttgaaatccgcctgaatgaacaagctgagaaaatgaaaggaaaactagaagaattgtctaatcagttacatcgcagtcaagaggaggaaggaacacaaagaaaggccttggaagcccaaaatgaaatacataccaaagagaaggagaagctgattgataagattcaagaaatgcaggaggccagtgaccacttgaagaaacaatttgaaactgaaagtgaagtcaagtgtaacttccggcaggaagcatcccggctcactttggaaaacagggatcttgaagaagaattagacatgaaagacagagtgattaaaaagctacaagatcaagtcaagacactaagcaagacaattggaaaagccaatgatgtgcactcgtcctcaggacccaaggagtaccttggaatgctgcaatacaagagagaagacgaggccaagctcattcagaacctcattcttgacttgaagccccgtggcgtggtggtgaacatgatccccgggctgccggctcatatcctgttcatgtgtgtgcgctacgcagactctctgaatgatgccaacatgctgaagtccctcatgaacagcaccattaatggcatcaagcaggtggttaaggaacatttagaagactttgaaatgctgtccttttggctttccaacacttgtcattttctcaattgcctgaagcagtacagcggagaagaggaattcatgaagcataatagtccacagcagaataagaattgcttgaacaattttgacctttcagaatacagacagattctcagtgatgtggctatacgaatatatcatcaatttattatcataatggaaaagaatatccaaccgataatagttccgggaatgctggagtatgagagcctgcagggcatttccggcctgaagcccacaggcttccggaagcgctcctctagcatagacgacacggacggctacaccatgacctccgtcctgcaacagctgagctacttttacaccaccatgtgccagaacggcctggaccccgagcttgtgaggcaggcggtgaagcagctcttcttcttgatcggggcggtcacgctgaacagcctcttcctgcgcaaggacatgtgctcctgcagaaaagggatgcagatcaggtgcaatatcagctacttagaagaatggcttaaagataagaacttgcagaacagcttagcaaaggaaactttggagcccctctctcaggcagcctggttgcttcaggtcaagaagaccacagacagtgatgccaaggagatctacgaacgctgcacctcactgtctgctgtgcagatcataaagatccttaattcatacacacctatagatgactttgagaagagagtgactccatcctttgttcgcaaagtacaggctctcctaaatagccgggaggattcatcacagctgatgttggataccaaatatctctttcaagtcacatttccttttaccccctctccacatgctctggaaatgattcagatccccagcagtttcaagctaggctttctgaataggttatagcaggagaaaaagtcaatgcactttttcttcaaaagctaagtgaaggttcaatatgagggatgtgttttattaattggcagtggaaattggaatgtgatttaaggaagaaaacagacttttctcaaatggaccacatcatctctcactcacagtgacaatgctgctcctgtaattttgtaagaattcacacacaccagctgtatttggaaaagccatgtctcactctcgaatctcagctggttttcactgaaattcctggagggctcatattttcttccacgtgcctcttgatctgttctgtcttgtggcagggctctaccaggagggagtgagatctggggacacagtggcttccaagttttctaaggttcatgtgaaacctgagtacatttacaaagctgcaagtggattctagtgctgagtcttccaggaaaaaatcccgtttggccaccgtgacctgccaaaagttctcttgccccatgcctgctggggacagaaggttttcatgaactctttttactgaaaatgccctgcatttaaaaatgtttattttagacccttctaaatttttttttttttttttttttgagactccggagtctcgctctatcgccaggctggagtgtagtggcatgatctcggcttattgcaacctccgcttcctgggttcaaacaattctcctgcctcagcctcctgagtagctgggactacaggcacctgccaccacgcccagctaatttttgtatttttagtggagacaggtttcaccatgttggccaggatggcctcgatctcttgacctcgtgatccgcccacctcagcctcccaaagtgctaggattacaggcgtgtgccaccgcgcccggctgacccttttaatttttaagagtgttcaatccgagatgaatcatttgaagtatttttatatgtatatctatttaaaactaatatattattaaagcttaattgccatgccgtttatcttctctgaaagaacttcaaatcttacctgccaacatattcaccataatttttttattttttaatacctttcatacaataacttttttaaaacaacctcagattgaaaaagcaacctaaattactttcgctctctaatcagcatttcaatgtatttatttttaaattttctcaaaaagtaactaaaaaattgtgtcggaccctacttttgagaaatctacgtttcccaagttttatgggaactggctattccttgtcccggcacaccttctcattccttcctttcagagcctaaaacctcatttgataagcactcctagtctctggcctgtggatccagtgctattctgtcaccaacctaagaatcccaattgcaccttctgtttctgacagtcacaggtgacagctgtgattctataatacagactggtgtcttagaggtaggaataatacatgattatgaagcatcaccctgctaatacataataatgtctttttatattataagtgattgagtttagttcatttcaatacattgtacatgaaaaaatgaaaagtagaactttgtaatactttaatcaataaaattaattaccaaatgaa

SEQ ID NO: 123 - DNA, 1647 bp, Homo sapiens
gaagatccaagcaggcggagccgcggtctggtccgcggggtaggcggggcgcaagagtgttcccgggggcggggggccgacccgcgtctaaaggtttccgcgattcacccgccggcgcctggcctggcccagttgcaccacgagcgctgcggacactcggggcggcagtcggtctgtcagtcctcccgccaggtcccgcggcccgcacctgccgcccgcacctgcagctccgcacctgcggccagtgcctactgccctctcttgccgcccgcacctgcagccccgcacctgccgcttgcacctgcagccccgcgctctacccggttcaagcatggctgaccaggcgcccttcgacacggacgtcaacaccctgacccgcttcgtcatggaggagggcaggaaggcccgcggcacgggcgagttgacccagctgctcaactcgctctgcacagcagtcaaagccatctcttcggcggtgcgcaaggcgggcatcgcgcacctctatggcattgctggttctaccaacgtgacaggtgatcaagttaagaagctggacgtcctctccaacgacctggttatgaacatgttaaagtcatcctttgccacgtgtgttctcgtgtcagaagaagataaacacgccatcatagtggaaccggagaaaaggggtaaatatgtggtctgttttgatccccttgatggatcttccaacatcgattgccttgtgtccgttggaaccatttttggcatctatagaaagaaatcaactgatgagccttctgagaaggatgctctgcaaccaggccggaacctggtggcagccggctacgcactgtatggcagtgccaccatgctggtccttgccatggactgtggggtcaactgcttcatgctggacccggccatcggggagttcattttggtggacaaggatgtgaagataaaaaagaaaggtaaaatctacagccttaacgagggctacgccagggactttgaccctgccgtcactgagtacatccagaggaagaagttccccccagataattcagctccttatggggcccggtatgtgggctccatggtggctgatgttcatcgcactctggtctacggagggatatttctgtaccccgctaacaagaagagccccaatggaaagctgagactgctgtacgaatgcaaccccatggcctacgtcatggagaaggctgggggaatggccaccactgggaaggaggccgtgttagacgtcattcccacagacattcaccagagggcgccggtgatcttgggatcccccgacgacgtgctcgagttcctgaaggtgtatgagaagcactctgcccagtgagcacctgccctgcctgcatccggagaattgcctctacctggaccttttgtctcacacagcagtaccctgacctgctgtgcaccttacattcctagagagcagaaataaaaagcatgactatttccaccatcaaatgctgtagaatgcttggcactccctaaccaaatgctgtctccataatgccactggtgttaagatatattttgagtggatggaggagaaataaacttattcctccttaaaaaaaaaaaaaaaaaaaaaaaaaaaaaaaaaaaaaaaaaaaaaaaaaaaaaaaaaaa

SEQ ID NO: 124 - DNA, 1893 bp, Homo sapiens
cgcgagcgccaggcgtccggccgccgtggctatgttcgtgtccgatttccgcaaagagttctacgaggtggtccagagccagagggtccttctcttcgtggcctcggacgtggatgctctgtgtgcgtgcaagatccttcaggccttgttccagtgtgaccacgtgcaatatacgctggttccagtttctgggtggcaagaacttgaaactgcatttcttgagcataaagaacagtttcattattttattctcataaactgtggagctaatgtagacctattggatattcttcaacctgatgaagacactatattctttgtgtgtgacacccataggccagtcaatgtcgtcaatgtatacaacgatacccagatcaaattactcattaaacaagatgatgaccttgaagttcccgcctatgaagacatcttcagggatgaagaggaggatgaagagcattcaggaaatgacagtgatgggtcagagccttctgagaagcgcacacggttagaagaggagatagtggagcaaaccatgcggaggaggcagcggcgagagtgggaggcccggagaagagacatcctctttgactacgagcagtatgaatatcatgggacatcgtcagccatggtgatgtttgagctggcttggatgctgtccaaggacctgaatgacatgctgtggtgggccatcgttggactaacagaccagtgggtgcaagacaagatcactcaaatgaaatacgtgactgatgttggtgtcctgcagcgccacgtttcccgccacaaccaccggaacgaggatgaggagaacacactctccgtggactgcacacggatctcctttgagtatgacctccgcctggtgctctaccagcactggtccctccatgacagcctgtgcaacaccagctataccgcagccaggttcaagctgtggtctgtgcatggacagaagcggctccaggagttccttgcagacatgggtcttcccctgaagcaggtgaagcagaagttccaggccatggacatctccttgaaggagaatttgcgggaaatgattgaagagtctgcaaataaatttgggatgaaggacatgcgcgtgcagactttcagcattcattttgggttcaagcacaagtttctggccagcgacgtggtctttgccaccatgtctttgatggagagccccgagaaggatggctcagggacagatcacttcatccaggctctggacagcctctccaggagtaacctggacaagctgtaccatggcctggaactcgccaagaagcagctgcgagccacccagcagaccattgccagctgcctttgcaccaacctcgtcatctcccaggggcctttcctgtactgctctctcatggagggcactccagatgtcatgctgttctctaggccggcatccctaagcctgctcagcaaacacctgctcaagtcctttgtgtgttcgacaaagaaccggcgctgcaaactgctgcccctggtgatggctgcccccctgagcatggagcatggcacagtgaccgtggtgggcatccccccagagaccgacagctcggacaggaagaacttttttgggagggcgtttgagaaggcagcggaaagcaccagctcccggatgctgcacaaccattttgacctctcagtaattgagctgaaagctgaggatcggagcaagtttctggacgcacttatttccctcctgtcctaggaatttgattcttccagaatgaccttcttatttatgtaactggctttcatttagattgtaagttatggacatgatttgagatgtagaagccattttttattaaataaaatgcttattttaggctccgtccccaaaaaaaaaaaaaaaaaaaaaaaaaaaaa

SEQ ID NO: 125 - DNA, 1447 bp, Homo sapiens
actgctggcggctggagcggagcgcaccgcggcggtggtgcccagagcggagcgcagctccctgccccgcccctccccctcggcctcgcggcgacggcggcggtggcggcttggacgactcggagagccgagtgaagacatttccacctggacacctgaccatgtgcctgccctgagcagcgaggcccaccaggcatctctgttgtgggcagcagggccaggtcctggtctgtggaccctcggcagttggcaggctccctctgcagtggggtctgggcctcggccccaccatgtcgagcctcggcggtggctcccaggatgccggcggcagtagcagcagcagcaccaatggcagcggtggcagtggcagcagtggcccaaaggcaggagcagcagacaagagtgcagtggtggctgccgccgcaccagcctcagtggcagatgacacaccaccccccgagcgtcggaacaagagcggtatcatcagtgagcccctcaacaagagcctgcgccgctcccgcccgctctcccactactcttcttttggcagcagtggtggtagtggcggtggcagcatgatgggcggagagtctgctgacaaggccactgcggctgcagccgctgcctccctgttggccaatgggcatgacctggcggcggccatggcggtggacaaaagcaaccctacctcaaagcacaaaagtggtgctgtggccagcctgctgagcaaggcagagcgggccacggagctggcagccgagggacagctgacgctgcagcagtttgcgcagtccacagagatgctgaagcgcgtggtgcaggagcatctcccgctgatgagcgaggcgggtgctggcctgcctgacatggaggctgtggcaggtgccgaagccctcaatggccagtccgacttcccctacctgggcgctttccccatcaacccaggcctcttcattatgaccccggcaggtgtgttcctggccgagagcgcgctgcacatggcgggcctggctgagtaccccatgcagggagagctggcctctgccatcagctccggcaagaagaagcggaaacgctgcggcatgtgcgcgccctgccggcggcgcatcaactgcgagcagtgcagcagttgtaggaatcgaaagactggccatcagatttgcaaattcagaaaatgtgaggaactcaaaaagaagccttccgctgctctggagaaggtgatgcttccgacgggagccgccttccggtggtttcagtgacggcggcggaacccaaagctgccctctccgtgcaatgtcactgctcgtgtggtctccagcaagggattcgggcgaagacaaacggatgcacccgtctttagaaccaaaaatattctctcacagatttcattcctgtttttatatatatattttttgttgtcgttttaacatctccacgtccctagcat

SEQ ID NO: 126 - DNA, 5460 bp, Homo sapiens
cgggcgcagggagccgccgccggggctgtaggcgccaaggccatgtccgactcgtgggtcccgaactccgcctcgggccaggacccagggggccgccggagggcctgggccgagctgctggcgggaagggtcaagagggaaaaatataatcctgaaagggcacagaaattaaaggaatcagctgtgcgcctcctgcgaagccatcaggacctgaatgcccttttgcttgaggtagaaggtccactgtgtaaaaaattgtctctcagcaaagtgattgactgtgacagttctgaggcctatgctaatcattctagttcatttataggctctgctttgcaggatcaagcctcaaggctgggggttcccgtgggtattctctcagccgggatggttgcctctagcgtgggacagatctgcacggctccagcggagaccagtcaccctgtgctgctgactgtggagcagagaaagaagctgtcttccctgttagagtttgctcagtatttattggcacacagtatgttctcccgtctttccttctgtcaagaattatggaaaatacagagttctttgttgcttgaagcggtgtggcatcttcacgtacaaggcattgtgagcctgcaagagctgctggaaagccatcccgacatgcatgctgtgggatcgtggctcttcaggaatctgtgctgcctttgtgaacagatggaagcatcctgccagcatgctgacgtcgccagggccatgctttctgattttgttcaaatgtttgttttgaggggatttcagaaaaactcagatctgagaagaactgtggagcctgaaaaaatgccgcaggtcacggttgatgtactgcagagaatgctgatttttgcacttgacgctttggctgctggagtacaggaggagtcctccactcacaagatcgtgaggtgctggttcggagtgttcagtggacacacgcttggcagtgtaatttccacagatcctctgaagaggttcttcagtcataccctgactcagatactcactcacagccctgtgctgaaagcatctgatgctgttcagatgcagagagagtggagctttgcgcggacacaccctctgctcacctcactgtaccgcaggctctttgtgatgctgagtgcagaggagttggttggccatttgcaagaagttctggaaacgcaggaggttcactggcagagagtgctctcctttgtgtctgccctggttgtctgctttccagaagcgcagcagctgcttgaagactgggtggcgcgtttgatggcccaggcattcgagagctgccagctggacagcatggtcactgcgttcctggttgtgcgccaggcagcactggagggcccctctgcgttcctgtcatatgcagactggttcaaggcctcctttgggagcacacgaggctaccatggctgcagcaagaaggccctggtcttcctgtttacgttcttgtcagaactcgtgccttttgagtctccccggtacctgcaggtgcacattctccacccacccctggttcccggcaagtaccgctccctcctcacagactacatctcattggccaagacacggctggccgacctcaaggtttctatagaaaacatgggactctacgaggatttgtcatcagctggggacattactgagccccacagccaagctcttcaggatgttgaaaaggccatcatggtgtttgagcatacggggaacatcccagtcaccgtcatggaggccagcatattcaggaggccttactacgtgtcccacttcctccccgccctgctcacacctcgagtgctccccaaagtccctgactcccgtgtggcgtttatagagtctctgaagagagcagataaaatccccccatctctgtactccacctactgccaggcctgctctgctgctgaagagaagccagaagatgcagccctgggagtgagggcagaacccaactctgctgaggagcccctgggacagctcacagctgcactgggagagctgagagcctccatgacagaccccagccagcgtgatgttatatcggcacaggtggcagtgatttctgaaagactgagggctgtcctgggccacaatgaggatgacagcagcgttgagatatcaaagattcagctcagcatcaacacgccgagactggagccacgggaacacatggctgtggacctcctgctgacgtctttctgtcagaacctgatggctgcctccagtgtcgctcccccggagaggcagggtccctgggctgccctcttcgtgaggaccatgtgtggacgtgtgctccctgcagtgctcacccggctctgccagctgctccgtcaccagggcccgagcctgagtgccccacatgtgctggggttggctgccctggccgtgcacctgggtgagtccaggtctgcgctcccagaggtggatgtgggtcctcctgcacctggtgctggccttcctgtccctgcgctctttgacagcctcctgacctgtaggacgagggattccttgttcttctgcctgaaattttgtacagcagcaatttcttactctctctgcaagttttcttcccagtcacgagatactttgtgcagctgcttatctccaggccttattaaaaagtttcagttcctcatgttcagattgttctcagaggcccgacagcctctttctgaggaggacgtagccagcctttcctggagacccttgcaccttccttctgcagactggcagagagctgccctctctctctggacacacagaaccttccgagaggtgttgaaagaggaagatgttcacttaacttaccaagactggttacacctggagctggaaattcaacctgaagctgatgctctttcagatactgaacggcaggacttccaccagtgggcgatccatgagcactttctccctgagtcctcggcttcagggggctgtgacggagacctgcaggctgcgtgtaccattcttgtcaacgcactgatggatttccaccaaagctcaaggagttatgaccactcagaaaattctgatttggtctttggtggccgcacaggaaatgaggatattatttccagattgcaggagatggtagctgacctggagctgcagcaagacctcatagtgcctctcggccacaccccttcccaggagcacttcctctttgagattttccgcagacggctccaggctctgacaagcgggtggagcgtggctgccagccttcagagacagagggagctgctaatgtacaaacggatcctcctccgcctgccttcgtctgtcctctgcggcagcagcttccaggcagaacagcccatcactgccagatgcgagcagttcttccacttggtcaactctgagatgagaaacttctgctcccacggaggtgccctgacacaggacatcactgcccacttcttcaggggcctcctgaacgcctgtctgcggagcagagacccctccctgatggtcgacttcatactggccaagtgccagacgaaatgccccttaattttgacctctgctctggtgtggtggccgagcctggagcctgtgctgctctgccggtggaggagacactgccagagcccgctgccccgggaactgcagaagctacaagaaggccggcagtttgccagcgatttcctctcccctgaggctgcctccccagcacccaacccggactggctctcagctgctgcactgcactttgcgattcaacaagtcagggaagaaaacatcaggaagcagctaaagaagctggactgcgagagagaggagctattggttttccttttcttcttctccttgatgggcctgctgtcgtcacatctgacctcaaatagcaccacagacctgccaaaggctttccacgtttgtgcagcaatcctcgagtgtttagagaagaggaagatatcctggctggcactctttcagttgacagagagtgacctcaggctggggcggctcctcctccgtgtggccccggatcagcacaccaggctgctgcctttcgctttttacagtcttctctcctacttccatgaagacgcggccatcagggaagaggccttcctgcatgttgctgtggacatgtacttgaagctggtccagctcttcgtggctggggatacaagcacagtttcacctccagctggcaggagcctggagctcaagggtcagggcaaccccgtggaactgataacaaaagctcgtctttttctgctgcagttaatacctcggtgcccgaaaaagagcttctcacacgtggcagagctgctggctgatcgtggggactgcgacccagaggtgagcgccgccctccagagcagacagcaggctgcccctgacgctgacctgtcccaggagcctcatctcttctgacgggacctgccactgcacaccagcccagctcccgtgtaaataatttattacaagcataacatggagctcttgttgcactaaaaagtggattacaaatctcctcgactgctttagtggggaaaggaatcaattatttatgaactgtccggccccgagtcactcagcgtttgcgggaaaataaaccactggtcccagagcagaggaaggctacttgagccggacaccaagcccgcctccagcaccaagggcgggcagcaccctccgaccctcccatgcgggtgcacacgaagggtgaggctgacacagccactgcggagtccaggctgctagaggtgctcatcctcactgccgtcctcaggtgggttcgggcttcaccgcctggccctctgtggtcacagaggggctcggtggcccaggtggtggttccgcctccaggggcagggccttgtcctgggtctgtgtcagcgggtgcaccatggacatgtgtacattgaggttgtgggccttctcaaaccgccggccacactggtcacaggcaaagtccagctcagtctcagccttgtgtttggtcatgtggtacttgagggatgcccgctgcctgcactggaacccacagacctcacacctgggggacagaggcagataagaaggtgcgagggccacagccctgggagggggtcctgactcacacttactgcaaaggcttggctcccgaatgtcgcatttggtggacgagaaggtgcttccgctgcttgaaggtttgtccacattcgtcacagatatagttccgcacctctgagaggggagagtccagtgagtccaggcccctgatgctccaacctcccggggggacgacgatgacaatgtgaaaccatcacagctgggaagacatttctgcacatggttcaccatgcagtgggcccaagcaaggggcctatgagggcctcgtttattaagatctttaaactgctttatacactgtcacgtggcttcatcagctgtgtgcatttcaggatggtttttaaagaaacctcagaaagctatttcctt

SEQ ID NO: 127 - DNA, 3342 bp, Homo sapiens
aatatcaacctgtttcctcctcctccttctcctcctcctccgtgacctcctcctcctctttctcctgagaaacttcgccccagcggtgcggagcgccgctgcgcagccggggagggacgcaggcaggcggcgggcagcgggaggcggcagcccggtgcggtccccgcggctctcggcggagccccgcgcccgccgcgccatggcccgaagaccccggcacagcatatatagcagtgacgaggatgatgaggactttgagatgtgtgaccatgactatgatgggctgcttcccaagtctggaaagcgtcacttggggaaaacaaggtggacccgggaagaggatgaaaaactgaagaagctggtggaacagaatggaacagatgactggaaagttattgccaattatctcccgaatcgaacagatgtgcagtgccagcaccgatggcagaaagtactaaaccctgagctcatcaagggtccttggaccaaagaagaagatcagagagtgatagagcttgtacagaaatacggtccgaaacgttggtctgttattgccaagcacttaaaggggagaattggaaaacaatgtagggagaggtggcataaccacttgaatccagaagttaagaaaacctcctggacagaagaggaagacagaattatttaccaggcacacaagagactggggaacagatgggcagaaatcgcaaagctactgcctggacgaactgataatgctatcaagaaccactggaattctacaatgcgtcggaaggtcgaacaggaaggttatctgcaggagtcttcaaaagccagccagccagcagtggccacaagcttccagaagaacagtcatttgatgggttttgctcaggctccgcctacagctcaactccctgccactggccagcccactgttaacaacgactattcctattaccacatttctgaagcacaaaatgtctccagtcatgttccataccctgtagcgttacatgtaaatatagtcaatgtccctcagccagctgccgcagccattcagagacactataatgatgaagaccctgagaaggaaaagcgaataaaggaattagaattgctcctaatgtcaaccgagaatgagctaaaaggacagcaggtgctaccaacacagaaccacacatgcagctaccccgggtggcacagcaccaccattgccgaccacaccagacctcatggagacagtgcacctgtttcctgtttgggagaacaccactccactccatctctgccagcggatcctggctccctacctgaagaaagcgcctcgccagcaaggtgcatgatcgtccaccagggcaccattctggataatgttaagaacctcttagaatttgcagaaacactccaatttatagattctttcttaaacacttccagtaaccatgaaaactcagacttggaaatgccttctttaacttccacccccctcattggtcacaaattgactgttacaacaccatttcatagagaccagactgtgaaaactcaaaaggaaaatactgtttttagaaccccagctatcaaaaggtcaatcttagaaagctctccaagaactcctacaccattcaaacatgcacttgcagctcaagaaattaaatacggtcccctgaagatgctacctcagacaccctctcatctagtagaagatctgcaggatgtgatcaaacaggaatctgatgaatctggaattgttgctgagtttcaagaaaatggaccacccttactgaagaaaatcaaacaagaggtggaatctccaactgataaatcaggaaacttcttctgctcacaccactgggaaggggacagtctgaatacccaactgttcacgcagacctcgcctgtggcagatgcaccgaatattcttacaagctccgttttaatggcaccagcatcagaagatgaagacaatgttctcaaagcatttacagtacctaaaaacaggtccctggcgagccccttgcagccttgtagcagtacctgggaacctgcatcctgtggaaagatggaggagcagatgacatcttccagtcaagctcgtaaatacgtgaatgcattctcagcccggacgctggtcatgtgagacatttccagaaaagcattatggttttcagaacacttcaagttgacttgggatatatcattcctcaacatgaaacttttcatgaatgggagaagaacctatttttgttgtggtacaacagttgagagcagcaccaagtgcatttagttgaatgaagtcttcttggatttcacccaactaaaaggatttttaaaaataaataacagtcttacctaaattattaggtaatgaattgtagccagttgttaatatcttaatgcagatttttttaaaaaaaacataaaatgatttatctgtattttaaaggatccaacagatcagtattttttcctgtgatgggttttttgaaatttgacacattaaaaggtactccagtatttcacttttctcgatcactaaacatatgcatatatttttaaaaatcagtaaaagcattactctaagtgtagacttaataccatgtgacatttaatccagattgtaaatgctcatttatggttaatgacattgaaggtacatttattgtaccaaaccattttatgagttttctgttagcttgctttaaaaattattactgtaagaaatagttttataaaaaattatatttttattcagtaatttaattttgtaaatgccaaatgaaaaacgttttttgctgctatggtcttagcctgtagacatgctgctagtatcagaggggcagtagagcttggacagaaagaaaagaaacttggtgttaggtaattgactatgcactagtatttcagactttttaattttatatatatatacattttttttccttctgcaatacatttgaaaacttgtttgggagactctgcattttttattgtggtttttttgttattgttggtttatacaagcatgcgttgcacttcttttttgggagatgtgtgttgttgatgttctatgttttgttttgagtgtagcctgactgttttataatttgggagttctgcatttgatccgcatcccctgtggtttctaagtgtatggtctcagaactgttgcatggatcctgtgtttgcaactggggagacagaaactgtggttgatagccagtcactgccttaagaacatttgatgcaagatggccagcactgaacttttgagatatgacggtgtacttactgccttgtagcaaaataaagatgtgcccttattttacctaaaaaaaaaaaaaaaaaaaaaaaaaaaaa

SEQ ID NO: 128 - DNA, 1755 bp, Homo sapiens
cgcgagggtgcctgtccgccgctcgccgcgctgaggcagtgcggggcgggcgcgcctaggctgccgcccagcgccctcgccgcggccatgcccgggccctagagcgcctgccgcagcttgcgccccgcagccccgcagccccgcgcccgccgccgcctcttcaatgggcaacctgctcggcggggtcagcttccgcgagcccaccaccgtggaggactgcgactccacctggcagaccgactcggagcccgagcccgaagaaccagggccgggcggcggcagcgagggcccggggcaggagtccgagcagcccgcgcagcccccggagcaagccggcgggcggcccggcgccagccccgcgccggacgaggacgccgaggcggcgggcgccgagcagggtggtgattccactgaagcaactgccaaaccaaagagaagtttttatgctgccagggatttgtacaagtaccgacaccagtacccaaacttcaaagatatccgatatcaaaatgacttgagcaatcttcgtttttataagaataaaattccattcaagccagatggtgtttacattgaagaagttctaagtaaatggaaaggagattatgaaaaactggagcacaaccacacttacattcaatggcttttccccctgagagaacaaggcttgaacttctatgccaaagaactaactacatatgaaattgaggaattcaaaaaaacaaaagaagcaattagaagattcctcctggcttataaaatgatgctagaattttttggaataaaactgactgataaaactggaaatgttgctcgggctgttaactggcaggaaagatttcagcatctgaatgagtcccagcacaactatttaagaatcactcgtattcttaaaagccttggtgagcttggatatgaaagttttaaatctcctcttgtaaaatttattcttcatgaagctcttgtggagaatactattcccaatattaagcagagtgctctagagtattttgtttatacaattagagacagaagagaaaggagaaagctcctgcggttcgcccagaaacactacacgccttcagagaactttatctggggaccgcctcgaaaagaacagtcggagggaagcaaagcccagaaaatgtcttcccctctcgcctccagtcataacagtcaaacttctatgcacaaaaaagccaaggactccaaaaattcctcctcagctgttcatttaaatagcaaaacagctgaagacaaaaaagtggcaccaaaagagcctgtggaagagacagacaggcccagcccagagcccagcaatgaagctgccaagccaagaaatacagagaaggacagtaatgctgagaacatgaattctcaacctgagaaaacagttactactcccacagaaaaaaaggagagtgtatctcctgagaataacgaagaaggtggaaatgataaccaagacaatgaaaatcctggaaatacaaattgccatgatgttgtactagtacagtgaattatcagaaaacccagaagccagtttaggctagagaggaaaaaactactgtatcatttatcctaaagaacagagatgaggtcaatttcaaattttagccatctgtttgtgatttctgtcataagcattttgttgtttgtttttttattttggatgacaatgaattgaatatctaataaggagatttaagataagacccaataaatgaatgtattctgtaaaaaaaaaaaaaaaaa

SEQ ID NO: 129 - DNA, 2896 bp, Homo sapiens
acgcttgcgcgcgggatttaaactgcggcggtttacgcggcgttaagacttcgtagggttagcgaaattgaggtttcttggtattgcgcgtttctcttccttgctgactctccgaatggccatggactcgtcgcttcaggcccgcctgtttcccggtctcgctatcaagatccaacgcagtaatggtttaattcacagtgccaatgtaaggactgtgaacttggagaaatcctgtgtttcagtggaatgggcagaaggaggtgccacaaagggcaaagagattgattttgatgatgtggctgcaataaacccagaactcttacagcttcttcccttacatccgaaggacaatctgcccttgcaggaaaatgtaacaatccagaaacaaaaacggagatccgtcaactccaaaattcctgctccaaaagaaagtcttcgaagccgctccactcgcatgtccactgtctcagagcttcgcatcacggctcaggagaatgacatggaggtggagctgcctgcagctgcaaactcccgcaagcagttttcagttcctcctgcccccactaggccttcctgccctgcagtggctgaaataccattgaggatggtcagcgaggagatggaagagcaagtccattccatccgaggcagctcttctgcaaaccctgtgaactcagttcggaggaaatcatgtcttgtgaaggaagtggaaaaaatgaagaacaagcgagaagagaagaaggcccagaactctgaaatgagaatgaagagagctcaggagtatgacagtagttttccaaactgggaatttgcccgaatgattaaagaatttcgggctactttggaatgtcatccacttactatgactgatcctatcgaagagcacagaatatgtgtctgtgttaggaaacgcccactgaataagcaagaattggccaagaaagaaattgatgtgatttccattcctagcaagtgtctcctcttggtacatgaacccaagttgaaagtggacttaacaaagtatctggagaaccaagcattctgctttgactttgcatttgatgaaacagcttcgaatgaagttgtctacaggttcacagcaaggccactggtacagacaatctttgaaggtggaaaagcaacttgttttgcatatggccagacaggaagtggcaagacacatactatgggcggagacctctctgggaaagcccagaatgcatccaaagggatctatgccatggcctcccgggacgtcttcctcctgaagaatcaaccctgctaccggaagttgggcctggaagtctatgtgacattcttcgagatctacaatgggaagctgtttgacctgctcaacaagaaggccaagctgcgcgtgctggaggacggcaagcaacaggtgcaagtggtggggctgcaggagcatctggttaactctgctgatgatgtcatcaagatgatcgacatgggcagcgcctgcagaacctctgggcagacatttgccaactccaattcctcccgctcccacgcgtgcttccaaattattcttcgagctaaagggagaatgcatggcaagttctctttggtagatctggcagggaatgagcgaggcgcggacacttccagtgctgaccggcagacccgcatggagggcgcagaaatcaacaagagtctcttagccctgaaggagtgcatcagggccctgggacagaacaaggctcacaccccgttccgtgagagcaagctgacacaggtgctgagggactccttcattggggagaactctaggacttgcatgattgccacgatctcaccaggcataagctcctgtgaatatactttaaacaccctgagatatgcagacagggtcaaggagctgagcccccacagtgggcccagtggagagcagttgattcaaatggaaacagaagagatggaagcctgctctaacggggcgctgattccaggcaatttatccaaggaagaggaggaactgtcttcccagatgtccagctttaacgaagccatgactcagatcagggagctggaggagaaggctatggaagagctcaaggagatcatacagcaaggaccagactggcttgagctctctgagatgaccgagcagccagactatgacctggagacctttgtgaacaaagcggaatctgctctggcccagcaagccaagcatttctcagccctgcgagatgtcatcaaggccttgcgcctggccatgcagctggaagagcaggctagcagacaaataagcagcaagaaacggccccagtgacgactgcaaataaaaatctgtttggtttgacacccagcctcttccctggccctccccagagaactttgggtacctggtgggtctaggcagggtctgagctgggacaggttctggtaaatgccaagtatgggggcatctgggcccagggcagctggggagggggtcagagtgacatgggacactccttttctgttcctcagttgtcgccctcacgagaggaaggagctcttagttacccttttgtgttgcccttctttccatcaaggggaatgttctcagcatagagctttctccgcagcatcctgcctgcgtggactggctgctaatggagagctccctggggttgtcctggctctggggagagagacggagcctttagtacagctatctgctggctctaaaccttctacgcctttgggccgagcactgaatgtcttgtactttaaaaaaatgtttctgagacctctttctactttactgtctccctagagatcctagaggatccctactgttttctgttttatgtgtttatacattgtatgtaacaataaagagaaaaaataaatcagctgtttaagtgtgtggaaaaaaaaaaaaaaaaaa

SEQ ID NO: 130 - DNA, 3452 bp, Homo sapiens
aaaatcgcgcgcggccccgcggccagcctgggtaggggcaaggcgcagccaatgggaagggtcggaggcatggcacagccaatgggaagggccggggcaccaaagccaatgggaagggccgggagcgcgcggcgcgggagatttaaaggctgctggagtgaggggtcgcccgtgcaccctgtcccagccgtcctgtcctggctgctcgctctgcttcgctgcgcctccactatgctctccctccgtgtcccgctcgcgcccatcacggacccgcagcagctgcagctctcgccgctgaaggggctcagcttggtcgacaaggagaacacgccgccggccctgagcgggacccgcgtcctggccagcaagaccgcgaggaggatcttccaggagcccacggagccgaaaactaaagcagctgcccccggcgtggaggatgagccgctgctgagagaaaacccccgccgctttgtcatcttccccatcgagtaccatgatatctggcagatgtataagaaggcagaggcttccttttggaccgccgaggaggtggacctctccaaggacattcagcactgggaatccctgaaacccgaggagagatattttatatcccatgttctggctttctttgcagcaagcgatggcatagtaaatgaaaacttggtggagcgatttagccaagaagttcagattacagaagcccgctgtttctatggcttccaaattgccatggaaaacatacattctgaaatgtatagtcttcttattgacacttacataaaagatcccaaagaaagggaatttctcttcaatgccattgaaacgatgccttgtgtcaagaagaaggcagactgggccttgcgctggattggggacaaagaggctacctatggtgaacgtgttgtagcctttgctgcagtggaaggcattttcttttccggttcttttgcgtcgatattctggctcaagaaacgaggactgatgcctggcctcacattttctaatgaacttattagcagagatgagggtttacactgtgattttgcttgcctgatgttcaaacacctggtacacaaaccatcggaggagagagtaagagaaataattatcaatgctgttcggatagaacaggagttcctcactgaggccttgcctgtgaagctcattgggatgaattgcactctaatgaagcaatacattgagtttgtggcagacagacttatgctggaactgggttttagcaaggttttcagagtagagaacccatttgactttatggagaatatttcactggaaggaaagactaacttctttgagaagagagtaggcgagtatcagaggatgggagtgatgtcaagtccaacagagaattcttttaccttggatgctgacttctaaatgaactgaagatgtgcccttacttggctgattttttttttccatctcataagaaaaatcagctgaagtgttaccaactagccacaccatgaattgtccgtaatgttcattaacagcatctttaaaactgtgtagctacctcacaaccagtcctgtctgtttatagtgctggtagtatcaccttttgccagaaggcctggctggctgtgacttaccatagcagtgacaatggcagtcttggctttaaagtgaggggtgaccctttagtgagcttagcacagcgggattaaacagtcctttaaccagcacagccagttaaaagatgcagcctcactgcttcaacgcagattttaatgtttacttaaatataaacctggcactttacaaacaaataaacattgtttgtactcacaaggcgataatagcttgatttatttggtttctacaccaaatacattctcctgaccactaatgggagccaattcacaattcactaagtgactaaagtaagttaaacttgtgtagactaagcatgtaatttttaagttttattttaatgaattaaaatatttgttaaccaactttaaagtcagtcctgtgtatacctagatattagtcagttggtgccagatagaagacaggttgtgtttttatcctgtggcttgtgtagtgtcctgggattctctgccccctctgagtagagtgttgtgggataaaggaatctctcagggcaaggagcttcttaagttaaatcactagaaatttaggggtgatctgggccttcatatgtgtgagaagccgtttcattttatttctcactgtattttcctcaacgtctggttgatgagaaaaaattcttgaagagttttcatatgtgggagctaaggtagtattgtaaaatttcaagtcatccttaaacaaaatgatccacctaagatcttgcccctgttaagtggtgaaatcaactagaggtggttcctacaagttgttcattctagttttgtttggtgtaagtaggttgtgtgagttaattcatttatatttactatgtctgttaaatcagaaattttttattatctatgttcttctagattttacctgtagttcatacttcagtcacccagtgtcttattctggcattgtctaaatctgagcattgtctagggggatcttaaactttagtaggaaaccatgagctgttaatacagtttccattcaaatattaatttcagaatgaaacataatttttttttttttttttgagatggagtctcgctctgttgcccaggctggagtgcagtggcgcgattttggctcactgtaacctccatctcctgggttcaagcaattctcctgtctcagcctccctagtagctgggactgcaggtatgtgctaccacacctggctaatttttgtatttttagtagagatggagtttcaccatattggtcaggctggtcttgaactcctgacctcaggtgatccacccacctcggcctcccaaagtgctgggattgcaggcgtgataaacaaatattcttaatagggctactttgaattaatctgcctttatgtttgggagaagaaagctgagacattgcatgaaagatgatgagagataaatgttgatcttttggccccatttgttaattgtattcagtatttgaacgtcgtcctgtttattgttagttttcttcatcatttattgtatagacaatttttaaatctctgtaatatgatacattttcctatcttttaagttattgttacctaaagttaatccagattatatggtccttatatgtgtacaacattaaaatgaaaggctttgtcttgcattgtgaggtacaggcggaagttggaatcaggttttaggattctgtctctcattagctgaataatgtgaggattaacttctgccagctcagaccatttcctaatcagttgaaagggaaacaagtatttcagtctcaaaattgaataatgcacaagtcttaagtgattaaaataaaactgttcttatgtcagtttcaaaaaaaaaaaaaaaaaa

SEQ ID NO: 131 - DNA, 3452 bp, Homo sapiens
atgcaggcgcgctactccgtgtccagccccaactccctgggagtggtgccctacctcggcggcgagcagagctactaccgcgcggcggccgcggcggccgggggcggctacaccgccatgccggcccccatgagcgtgtactcgcaccctgcgcacgccgagcagtacccgggcggcatggcccgcgcctacgggccctacacgccgcagccgcagcccaaggacatggtgaagccgccctatagctacatcgcgctcatcaccatggccatccagaacgccccggacaagaagatcaccctgaacggcatctaccagttcatcatggaccgcttccccttctaccgggacaacaagcagggctggcagaacagcatccgccacaacctctcgctcaacgagtgcttcgtcaaggtgccgcgcgacgacaagaagccgggcaagggcagctactggacgctggacccggactcctacaacatgttcgagaacggcagcttcctgcggcggcggcggcgcttcaagaagaaggacgcggtgaaggacaaggaggagaaggacaggctgcacctcaaggagccgcccccgcccggccgccagcccccgcccgcgccgccggagcaggccgacggcaacgcgcccggtccgcagccgccgcccgtgcgcatccaggacatcaagaccgagaacggtacgtgcccctcgccgccccagcccctgtccccggccgccgccctgggcagcggcagcgccgccgcggtgcccaagatcgagagccccgacagcagcagcagcagcctgtccagcgggagcagccccccgggcagcctgccgtcggcgcggccgctcagcctggacggtgcggattccgcgccgccgccgcccgcgccctccgccccgccgccgcaccatagccagggcttcagcgtggacaacatcatgacgtcgctgcgggggtcgccgcagagcgcggccgcggagctcagctccggccttctggcctcggcggccgcgtcctcgcgcgcggggatcgcacccccgctggcgctcggcgcctactcgcccggccagagctccctctacagctccccctgcagccagacctccagcgcgggcagctcgggcggcggcggcggcggcgcgggggccgcggggggcgcgggcggcgccgggacctaccactgcaacctgcaagccatgagcctgtacgcggccggcgagcgcgggggccacttgcagggcgcgcccgggggcgcgggcggctcggccgtggacgaccccctgcccgactactctctgcctccggtcaccagcagcagctcgtcgtccctgagtcacggcggcggcggcggcggcggcgggggaggccaggaggccggccaccaccctgcggcccaccaaggccgcctcacctcgtggtacctgaaccaggcgggcggagacctgggccacttggcgagcgcggcggcggcggcggcggccgcaggctacccgggccagcagcagaacttccactcggtgcgggagatgttcgagtcacagaggatcggcttgaacaactctccagtgaacgggaatagtagctgtcaaatggccttcccttccagccagtctctgtaccgcacgtccggagctttcgtctacgactgtagcaagttttgacacaccctcaaagccgaactaaatcgaaccccaaagcaggaaaagctaaaggaacccatcaaggcaaaatcgaaactaaaaaaaaaaaatccaattaaaaaaaacccctgagaatattcaccacaccagcgaacagaatatccctccaaaaattcagctcaccagcaccagcacgaagaaaactctattttcttaaccgattaattcagagccacctccactttgccttgtctaaataaacaaacccgtaaactgttttatacagagacagcaaaatcttggtttattaaaggacagtgttactccagataacacgtaagtttcttcttgcttttcagagacctgctttcccctcctcccgtctcccctctcttgccttcttccttgcctctcacctgtaagatattattttatcctatgttgaagggagggggaaagtccccgtttatgaaagtcgctttctttttattcatggacttgttttaaaatgtaaattgcaacatagtaatttatttttaatttgtagttggatgtcgtggaccaaacgccagaaagtgttcccaaaacctgacgttaaattgcctgaaactttaaattgtgctttttttctcattataaaaagggaaactgtattaatcttattctatcctcttttctttctttttgttgaacatattcattgtttgtttattaataaattaccattcagtttgaatgagacctatatgtctggatactttaatagagctttaattattacgaaaaaagatttcagagataaaacactagaagttacctattctccacctaaatctctgaaaaatggagaaaccctctgactagtccatgtcaaattttactaaaagtctttttgtttagatttattttcctgcagcatcttctgcaaaatgtactatatagtcagcttgctttgaggctagtaaaaagatatttttctaaacagattggagttggcatataaacaaatacgttttctcactaatgacagtccatgattcggaaattttaagcccatgaatcagccgcggtcttaccacggtgatgcctgtgtgccgagagatgggactgtgcggccagatatgcacagataaatatttggcttgtgtattccatataaaattgcagtgcatattatacatccctgtgagccagatgctgaatagatattttcctattatttcagtcctttataaaaggaaaaataaaccagtttttaaatgtatgtatataattctcccccatttacaatccttcatgtattacatagaaggattgcttttttaaaaatatactgcgggttggaaagggatatttaatctttgagaaactattttagaaaatatgtttgtagaacaattatttttgaaaaagatttaaagcaataacaagaaggaaggcgagaggagcagaacattttggtctagggtggtttctttttaaaccattttttcttgttaatttacagttaaacctaggggacaatccggattggccctcccccttttgtaaataacccaggaaatgtaataaattcattatcttagggtgatctgccctgccaatcagactttggggagatggcgatttgattacagacgttcgggggggtggggggcttgcagtttgttttggagataatacagtttcctgctatctgccgctcctatctagaggcaacacttaagcagtaattgctgttgcttgttgtcaaaatttgatcattgttaaaggattgctgcaaataaatacactttaatttcagtcaaaaa

SEQ ID NO: 132 - DNA, 4482 bp, Homo sapiens
gcactccagccctgcagcctccggagtcagtgccgcgcgcccgccgccccgcgccttcctgctcgccgcacctccgggagccggggcgcacccagcccgcagcgccgcctccccgcccgcgccgcctccgaccgcaggccgagggccgccactggccggggggaccgggcagcagcttgcggccgcggagccgggcaacgctggggactgcgccttttgtccccggaggtccctggaagtttgcggcaggacgcgcgcggggaggcggcggaggcagccccgacgtcgcggagaacagggcgcagagccggcatgggcatcgggcgcagcgaggggggccgccgcggggcagccctgggcgtgctgctggcgctgggcgcggcgcttctggccgtgggctcggccagcgagtacgactacgtgagcttccagtcggacatcggcccgtaccagagcgggcgcttctacaccaagccacctcagtgcgtggacatccccgcggacctgcggctgtgccacaacgtgggctacaagaagatggtgctgcccaacctgctggagcacgagaccatggcggaggtgaagcagcaggccagcagctgggtgcccctgctcaacaagaactgccacgccggcacccaggtcttcctctgctcgctcttcgcgcccgtctgcctggaccggcccatctacccgtgtcgctggctctgcgaggccgtgcgcgactcgtgcgagccggtcatgcagttcttcggcttctactggcccgagatgcttaagtgtgacaagttccccgagggggacgtctgcatcgccatgacgccgcccaatgccaccgaagcctccaagccccaaggcacaacggtgtgtcctccctgtgacaacgagttgaaatctgaggccatcattgaacatctctgtgccagcgagtttgcactgaggatgaaaataaaagaagtgaaaaaagaaaatggcgacaagaagattgtccccaagaagaagaagcccctgaagttggggcccatcaagaagaaggacctgaagaagcttgtgctgtacctgaagaatggggctgactgtccctgccaccagctggacaacctcagccaccacttcctcatcatgggccgcaaggtgaagagccagtacttgctgacggccatccacaagtgggacaagaaaaacaaggagttcaaaaacttcatgaagaaaatgaaaaaccatgagtgccccacctttcagtccgtgtttaagtgattctcccgggggcagggtggggagggagcctcgggtggggtgggagcgggggggacagtgccccgggaacccggtgggtcacacacacgcactgcgcctgtcagtagtggacattgtaatccagtcggcttgttcttgcagcattcccgctcccttccctccatagccacgctccaaaccccagggtagccatggccgggtaaagcaagggccatttagattaggaaggtttttaagatccgcaatgtggagcagcagccactgcacaggaggaggtgacaaaccatttccaacagcaacacagccactaaaacacaaaaagggggattgggcggaaagtgagagccagcagcaaaaactacattttgcaacttgttggtgtggatctattggctgatctatgcctttcaactagaaaattctaatgattggcaagtcacgttgttttcaggtccagagtagtttctttctgtctgctttaaatggaaacagactcataccacacttacaattaaggtcaagcccagaaagtgataagtgcagggaggaaaagtgcaagtccattatgtaatagtgacagcaaagggaccaggggagaggcattgccttctctgcccacagtctttccgtgtgattgtctttgaatctgaatcagccagtctcagatgccccaaagtttcggttcctatgagcccggggcatgatctgatccccaagacatgtggaggggcagcctgtgcctgcctttgtgtcagaaaaaggaaaccacagtgagcctgagagagacggcgattttcgggctgagaaggcagtagttttcaaaacacatagttaaaaaagaaacaaatgaaaaaaattttagaacagtccagcaaattgctagtcagggtgaattgtgaaattgggtgaagagcttaggattctaatctcatgttttttccttttcacatttttaaaagaacaatgacaaacacccacttatttttcaaggttttaaaacagtctacattgagcatttgaaaggtgtgctagaacaaggtctcctgatccgtccgaggctgcttcccagaggagcagctctccccaggcatttgccaagggaggcggatttccctggtagtgtagctgtgtggctttccttcctgaagagtccgtggttgccctagaacctaacaccccctagcaaaactcacagagctttccgtttttttctttcctgtaaagaaacatttcctttgaacttgattgcctatggatcaaagaaattcagaacagcctgcctgtccccccgcactttttacatatatttgtttcatttctgcagatggaaagttgacatgggtggggtgtccccatccagcgagagagtttcaaaagcaaaacatctctgcagtttttcccaagtaccctgagatacttcccaaagcccttatgtttaatcagcgatgtatataagccagttcacttagacaactttacccttcttgtccaatgtacaggaagtagttctaaaaaaaatgcatattaatttcttcccccaaagccggattcttaattctctgcaacactttgaggacatttatgattgtccctctgggccaatgcttatacccagtgaggatgctgcagtgaggctgtaaagtggccccctgcggccctagcctgacccggaggaaaggatggtagattctgttaactcttgaagactccagtatgaaaatcagcatgcccgcctagttacctaccggagagttatcctgataaattaacctctcacagttagtgatcctgtccttttaacaccttttttgtggggttctctctgacctttcatcgtaaagtgctggggaccttaagtgatttgcctgtaattttggatgattaaaaaatgtgtatatatattagctaattagaaatattctacttctctgttgtcaaactgaaattcagagcaagttcctgagtgcgtggatctgggtcttagttctggttgattcactcaagagttcagtgctcatacgtatctgctcattttgacaaagtgcctcatgcaaccgggccctctctctgcggcagagtccttagtggaggggtttacctggaacattagtagttaccacagaatacggaagagcaggtgactgtgctgtgcagctctctaaatgggaattctcaggtaggaagcaacagcttcagaaagagctcaaaataaattggaaatgtgaatcgcagctgtgggttttaccaccgtctgtctcagagtcccaggaccttgagtgtcattagttactttattgaaggttttagacccatagcagctttgtctctgtcacatcagcaatttcagaaccaaaagggaggctctctgtaggcacagagctgcactatcacgagcctttgtttttctccacaaagtatctaacaaaaccaatgtgcagactgattggcctggtcattggtctccgagagaggaggtttgcctgtgatttcctaattatcgctagggccaaggtgggatttgtaaagctttacaataatcattctggatagagtcctgggaggtccttggcagaactcagttaaatctttgaagaatatttgtagttatcttagaagatagcatgggaggtgaggattccaaaaacattttatttttaaaatatcctgtgtaacacttggctcttggtacctgtgggttagcatcaagttctccccagggtagaattcaatcagagctccagtttgcatttggatgtgtaaattacagtaatcccatttcccaaacctaaaatctgtttttctcatcagactctgagtaactggttgctgtgtcataacttcatagatgcaggaggctcaggtgatctgtttgaggagagcaccctaggcagcctgcagggaataacatactggccgttctgacctgttgccagcagatacacaggacatggatgaaattcccgtttcctctagtttcttcctgtagtactcctcttttagatcctaagtctcttacaaaagctttgaatactgtgaaaatgttttacattccatttcatttgtgttgtttttttaactgcattttaccagatgttttgatgttatcgcttatgttaatagtaattcccgtacgtgttcattttattttcatgctttttcagccatgtatcaatattcacttgactaaaatcactcaattaatcaatgataaaaaaaaaaaaaaaa

SEQ ID NO: 133 - DNA, 2554 bp, Homo sapiens
acaaggcagcctcgctcgagcgcaggccaatcggctttctagctagagggtttaactcctatttaaaaagaagaacctttgaattctaacggctgagctcttggaagacttgggtccttgggtcgcaggtgggagccgacgggtgggtagaccgtgggggatatctcagtggcggacgaggacggcggggacaaggggcggctggtcggagtggcggagcgtcaagtcccctgtcggttcctccgtccctgagtgtccttggcgctgccttgtgcccgcccagcgcctttgcatccgctcctgggcaccgaggcgccctgtaggatactgcttgttacttattacagctagagggtctcactccattgcccaggccagagtgcggggatatttgataagaaacttcagtgaaggccgggcgcggtggctcatgcccgtaatcccagcattttcggaggccgaggctggagtgcaatggtgtgatctcagctcactgcaacctctgcttcctgggtttaagtgattctcctgcctcagcctcccgagtagctgggattacaggcatcatggaccgatctaaagaaaactgcatttcaggacctgttaaggctacagctccagttggaggtccaaaacgtgttctcgtgactcagcaatttccttgtcagaatccattacctgtaaatagtggccaggctcagcgggtcttgtgtccttcaaattcttcccagcgcattcctttgcaagcacaaaagcttgtctccagtcacaagccggttcagaatcagaagcagaagcaattgcaggcaaccagtgtacctcatcctgtctccaggccactgaataacacccaaaagagcaagcagcccctgccatcggcacctgaaaataatcctgaggaggaactggcatcaaaacagaaaaatgaagaatcaaaaaagaggcagtgggctttggaagactttgaaattggtcgccctctgggtaaaggaaagtttggtaatgtttatttggcaagagaaaagcaaagcaagtttattctggctcttaaagtgttatttaaagctcagctggagaaagccggagtggagcatcagctcagaagagaagtagaaatacagtcccaccttcggcatcctaatattcttagactgtatggttatttccatgatgctaccagagtctacctaattctggaatatgcaccacttggaacagtttatagagaacttcagaaactttcaaagtttgatgagcagagaactgctacttatataacagaattggcaaatgccctgtcttactgtcattcgaagagagttattcatagagacattaagccagagaacttacttcttggatcagctggagagcttaaaattgcagattttgggtggtcagtacatgctccatcttccaggaggaccactctctgtggcaccctggactacctgccccctgaaatgattgaaggtcggatgcatgatgagaaggtggatctctggagccttggagttctttgctatgaatttttagttgggaagcctccttttgaggcaaacacataccaagagacctacaaaagaatatcacgggttgaattcacattccctgactttgtaacagagggagccagggacctcatttcaagactgttgaagcataatcccagccagaggccaatgctcagagaagtacttgaacacccctggatcacagcaaattcatcaaaaccatcaaattgccaaaacaaagaatcagctagcaaacagtcttaggaatcgtgcagggggagaaatccttgagccagggctgccatataacctgacaggaacatgctactgaagtttattttaccattgactgctgccctcaatctagaacgctacacaagaaatatttgttttactcagcaggtgtgccttaacctccctattcagaaagctccacatcaataaacatgacactctgaagtgaaagtagccacgagaattgtgctacttatactggttcataatctggaggcaaggttcgactgcagccgccccgtcagcctgtgctaggcatggtgtcttcacaggaggcaaatccagagcctggctgtggggaaagtgaccactctgccctgaccccgatcagttaaggagctgtgcaataaccttcctagtacctgagtgagtgtgtaacttattgggttggcgaagcctggtaaagctgttggaatgagtatgtgattctttttaagtatgaaaataaagatatatgtacagacttgtattttttctctggtggcattcctttaggaatgctgtgtgtctgtccggcaccccggtaggcctgattgggtttctagtcctccttaaccacttatctcccatatgagagtgtgaaaaataggaacacgtgctctacctccatttagggatttgcttgggatacagaagaggccatgtgtctcagagctgttaagggcttatttttttaaaacattggagtcatagcatgtgtgtaaactttaaatatgcaaataaataagtatctatgtctaaaaaaa

SEQ ID NO: 134 - DNA, 2223 bp, Homo sapiens
agcatccgggctcccggcagcggcgctgcggcggctcgcgggagacgctgcgcgcggggctagcgggcggcggagcggacggcgacggggcgctctcgggctgccggcggggccgagcgccgcgcgtcccgagcatggcaggctccctgcctccctgcgtggtggactgtggcaccgggtataccaagcttggctacgcaggcaacactgagccccagttcattattccttcatgtattgccatcagagagtcagcaaaggtagttgaccaagctcaaaggagagtgttgaggggagttgatgaccttgactttttcataggagatgaagccatcgataaacctacatatgctacaaagtggccgatacgacatggaatcattgaagactgggatcttatggaaaggttcatggagcaagtggtttttaaatatcttcgagctgaacctgaggaccattattttttaatgacagaacctccactcaatacaccagaaaacagagagtatcttgcagaaattatgtttgaatcatttaacgtaccaggactctacattgcagttcaggcagtgctggccttggcggcatcttggacatctcgacaagtgggtgaacgtacgttaacggggatagtcattgacagcggagatggagtcacccatgttatcccagtggcagaaggttatgtaattggaagctgcatcaaacacatcccgattgcaggtagagatattacgtatttcattcaacagctgctaagggagagggaggtgggaatccctcctgagcagtcactggagaccgcaaaagccattaaggagaaatactgttacatttgccccgatatagtcaaggaatttgccaagtatgatgtggatccccggaagtggatcaaacagtacacgggtatcaatgcgatcaaccagaagaagtttgttatagacgttggttacgaaagattcctgggacctgaaatattctttcacccggagtttgccaacccagactttatggagtccatctcagatgttgttgatgaagtaatacagaactgccccatcgatgtgcggcgcccgctgtataagaatgtcgtactctcaggaggctccaccatgttcagggatttcggacgccgactgcagagggatttgaagagagtggtggatgctaggctgaggctcagcgaggagctcagcggcgggaggatcaagccgaagcctgtggaggtccaggtggtcacgcatcacatgcagcgctacgccgtgtggttcggaggctccatgctggcctcgactcccgagttctttcaggtctgccacaccaagaaggactatgaagagtacgggcccagcatctgccgccacaaccccgtctttggagtcatgtcctagtgtctgcctgaacgcgtcgttcgatggtgtcacgttggggaacaagtgtccttcagaacccagagaaggccgccgttctgtaaatagcgacgtcggtgttgctgcccagcagcgtgcttgcattgccggtgcatgaggcgcggcgcgggcccttcagtaaaagccatttatccgtgtgccgaccgctgtctgccagcctcctccttctcccgccctcctcaccctcgctctccctcctcctcctcctccgagctgctagctgacaaatacaattctgaaggaatccaaatgtgactttgaaaattgttagagaaaacaacattagaaaatggcgcaaaatcgttaggtcccaggagagaatgtgggggcgcaaacccttttcctcccagcctatttttgtaaataaaatgtttaaacttgaaatacaaatcgatgtttatatttcctatcattttgtattttatggtatttggtacaactggctgatactaagcacgaatagatattgatgttatggagtgctgtaatccaaagtttttaattgtgaggcatgttctgatatgtttataggcaaacaaataaaacagcaaacttttttgccacatgtttgctagaaaatgattatactttattggagtgacatgaagtttgaacactaaacagtaatgtatgagaattactacagatacatgtatcttttagttttttttgtttgaactttctggagctgttttatagaagatgatggtttgttgtcggtgagtgttggatgaaatacttccttgcaccattgtaataaaagctgttagaatatttgtaaatatctaaaaaa

SEQ ID NO: 135 - DNA, 2932 bp, Homo sapiens
ggggagccctaggctcggcgctgccggaggggcccgagccgagccgcctgcgccccggccgggcagcgccgggcccgcttcccgcggggccacgccctgtcaaactttgttgcggcggctagcgcagcgggcccgcaagcgggcgggaggggcgccgggccgggccgggcagggcgcgggcggctaggggctccgagagcggcggccccggcccgcggccccaccatgccccagctcggcggcgggggcggcggcggcggcggcggcagcgggggaggcggcggctccagcgccggggcggccggcggaggggacgacctcggggcgaacgacgagctgatccccttccaggacgaggggggcgaggagcaggagccgagcagcgatagcgcctcggcgcagcgggacctagacgaggtcaagtcgtccctggtcaacgagtcggagaaccagagcagcagctcggactcggaggcggagaggcgcccgcagcccgtccgggacactttccagaagccgcgggactatttcgccgaagtgagaaggcctcaggacagcgcgttctttaaaggacccccgtaccctgggtaccccttcctgatgatcccggacctgagcagcccgtacctctccaacggacccctgtctcccggaggagcgcgcacctacctgcagatgaaatggcccctcctcgatgtcccctccagcgccacagtcaaggacacgaggtcaccatctccagcacacttgtctaataaagttcctgtcgttcagcacccgcatcacatgcatccgctgactcccctcatcacctacagcaatgaccacttctcccccggctcccctcccacccacctctccccagagatcgatccaaagacaggaatcccccggccccctcacccatccgagctgtcaccgtattacccactctctcccggagctgtcggacaaatcccccaccccctcggctggctcgtcccacagcaaggccagcccatgtactcccttcctcccggtggcttccggcacccttaccccgccctcgccatgaacgcctcgatgtccagcctggtctccagtcggttctctcctcacatggtggctcctgcccaccctggcctgcccacctcagggatcccccaccctgccatcgtctcccccatcgtcaagcaggaaccggcaccccccagcctgagccctgcagtgagcgtgaaatcaccagtcaccgtgaaaaaggaggaggaaaagaagccccacgtgaagaagcctctgaatgccttcatgttgtatatgaaggagatgagggccaaggtggtggctgagtgcaccctgaaggaaagtgcagccattaaccagatccttggaagaaagtggcacaacctgtctcgagaagaacaggccaagtactacgagctggcccggaaggagcggcagcttcactcgcagctctacccaacctggtcagcccgggacaactatggtaagaaaaagaagaggaagagagaaaagcagctgtcccagacacagtcacagcagcaagtccaggaggcagagggtgccctggcctccaagagcaagaagccatgtgttcagtacctgccccccgagaagccctgtgacagccctgcctcctcccacgggagcatgctggactccccggccactccctctgcagctttggcctcaccagctgcccctgctgccacccattcggagcaagcccagcccctctccctcaccaccaaaccagaaacccgggcccagctggctctccactctgccgccttcctgtcggctaaggctgcagcctcctcctctgggcagatgggcagccagcctcccctcctgtcccggcccctcccccttgggtccatgcccacagctctgctggcctctcccccgtccttccccgccacgctccatgcccaccaggccctcccggtgctacaggcccagcctctttccctggtcaccaagtctgcccactaagctccccccgacccctgcaggctgtcacatgactcattgagtagtaatgattcagaagaaaaagaaaaaggagactttattggtcaatatttgaccactctggactgttctgtaaagtggctggtaacaacagcactttacagtttgtagatgtaaccagtagctgatcttaaggcttttttaaaaaacaaaacaaaacaacaaaaaaaaatctttataagaaagagaactgaaaagtagcgtgctattcgtcctgtaggtgctgtggtggatggacctgggcagagggcacttctctctcttacctctcttgcactttctgtctcctgtctcttctcgcccctgccgcctgccccagcttccccgactccatctgcagctctgccattgtgacatttcctgttacccagcccaagttttcatcgtctgctcaataccgtgggttcttcttcgtcctctgtcctctgcccagtgtgaggccatcaccatgtgagaagacatcttggcctgatttgctgccaccagcgtcccctccctcagtgggcccgaactcgccagccccagctttcagtggagaaagcggtcctctgaaatggtttcctcccaacccccgcatttaaagggactcaaggtgcctgccacttcctcagcgaagaagtctgtgttcctccccgtccttgccagtggcgatcatcccttcacaatcccagagtggcaggcgggaccggccccatggtctggctcctgtcacctgggtccgtgccagcacaatctgccaaagttctagagaccctgttcccttccccatcacctcacatgcttcttctgtgtgtatttctttttgtttttatggtttttggagcaatttaaactcccagttgtttattttcacaaaagaaaataaaattgcagttgcaagaccttttaaaaaaaaaaaaaa

SEQ ID NO: 136 - DNA, 2731 bp, Homo sapiens
gcgcttggcgggagatagaaaagtgcttcaacccgcgccggcggcgactgcagttcctgcgagcgaggagcgcgggacctgctgacacgctgacgccttcgagcgcggcccggggcccggagcggccggagcagcccgggtcctgaccccggcccggctcccgctccgggctctgccggcgggcgggcgagcgcggcgcggtccgggccggggggatgtctcggcggacgcgctgcgaggatctggatgagctgcactaccaggacacagattcagatgtgccggagcagagggatagcaagtgcaaggtcaaatggacccatgaggaggacgagcagctgagggccctggtgaggcagtttggacagcaggactggaagttcctggccagccacttccctaaccgcactgaccagcaatgccagtacaggtggctgagagttttgaatccagaccttgtcaaggggccatggaccaaagaggaagaccaaaaagtcatcgagctggttaagaagtatggcacaaagcagtggacactgattgccaagcacctgaagggccggctggggaagcagtgccgtgaacgctggcacaaccacctcaaccctgaggtgaagaagtcttgctggaccgaggaggaggaccgcatcatctgcgaggcccacaaggtgctgggcaaccgctgggccgagatcgccaagatgttgccagggaggacagacaatgctgtgaagaatcactggaactctaccatcaaaaggaaggtggacacaggaggcttcttgagcgagtccaaagactgcaagcccccagtgtacttgctgctggagctcgaggacaaggacggcctccagagtgcccagcccacggaaggccagggaagtcttctgaccaactggccctccgtccctcctaccataaaggaggaggaaaacagtgaggaggaacttgcagcagccaccacatcgaaggaacaggagcccatcggtacagatctggacgcagtgcgaacaccagagcccttggaggaattcccgaagcgtgaggaccaggaaggctccccaccagaaacgagcctgccttacaagtgggtggtggaggcagctaacctcctcatccccgctgtgggttctagcctctctgaagccctggacttgatcgagtcggaccctgatgcttggtgtgacctgagtaaatttgacctccctgaggaaccatctgcagaggacagtatcaacaacagcctagtgcagctgcaagcgtcacatcagcagcaagtcctgccaccccgccagccttccgccctggtgcccagtgtgaccgagtaccgcctggatggccacaccatctcagacctgagccggagcagccggggcgagctgatccccatctcccccagcactgaagtcgggggctctggcattggcacaccgccctctgtgctcaagcggcagaggaagaggcgtgtggctctgtcccctgtcactgagaatagcaccagtctgtccttcctggattcctgtaacagcctcacgcccaagagcacacctgttaagaccctgcccttctcgccctcccagtttctgaacttctggaacaaacaggacacattggagctggagagcccctcgctgacatccaccccagtgtgcagccagaaggtggtggtcaccacaccactgcaccgggacaagacacccctgcaccagaaacatgctgcgtttgtaaccccagatcagaagtactccatggacaacactccccacacgccaaccccgttcaagaacgccctggagaagtacggacccctgaagcccctgccacagaccccgcacctggaggaggacttgaaggaggtgctgcgttctgaggctggcatcgaactcatcatcgaggacgacatcaggcccgagaagcagaagaggaagcctgggctgcggcggagccccatcaagaaagtccggaagtctctggctcttgacattgtggatgaggatgtgaagctgatgatgtccacactgcccaagtctctatccttgccgacaactgccccttcaaactcttccagcctcaccctgtcaggtatcaaagaagacaacagcttgctcaaccagggcttcttgcaggccaagcccgagaaggcagcagtggcccagaagccccgaagccacttcacgacacctgcccctatgtccagtgcctggaagacggtggcctgcggggggaccagggaccagcttttcatgcaggagaaagcccggcagctcctgggccgcctgaagcccagccacacatctcggaccctcatcttgtcctgaggtgttgagggtgtcacgagcccattctcatgtttacaggggttgtgggggcagagggggtctgtgaatctgagagtcattcaggtgacctcctgcagggagccttctgccaccagcccctccccagactctcaggtggaggcaacagggccatgtgctgccctgttgccgagcccagctgtgggcggctcctggtgctaacaacaaagttccacttccaggtctgcctggttccctccccaaggccacagggagctccgtcagcttctcccaagcccacgtcaggcctggcctcatctcagaccctgcttaggatgggggatgtggccaggggtgctcctgtgctcaccctctcttggtgcatttttttggaagaataaaattgcctctctcttaaaaaaaaaaaaaaaaaa

SEQ ID NO: 137 - DNA, 11389 bp, Homo sapiens
atggcgccgccgccgccgcccgtgctgcccgtgctgctgctcctggccgccgccgccgccctgccggcgatggggctgcgagcggccgcctgggagccgcgcgtacccggcgggacccgcgccttcgccctccggcccggctgtacctacgcggtgggcgccgcttgcacgccccgggcgccgcgggagctgctggacgtgggccgcgatgggcggctggcaggacgtcggcgcgtctcgggcgcggggcgcccgctgccgctgcaagtccgcttggtggcccgcagtgccccgacggcgctgagccgccgcctgcgggcgcgcacgcaccttcccggctgcggagcccgtgcccggctctgcggaaccggtgcccggctctgcggggcgctctgcttccccgtccccggcggctgcgcggccgcgcagcattcggcgctcgcagctccgaccaccttacccgcctgccgctgcccgccgcgccccaggccccgctgtcccggccgtcccatctgcctgccgccgggcggctcggtccgcctgcgtctgctgtgcgccctgcggcgcgcggctggcgccgtccgggtgggactggcgctggaggccgccaccgcggggacgccctccgcgtcgccatccccatcgccgcccctgccgccgaacttgcccgaagcccgggcggggccggcgcgacgggcccggcggggcacgagcggcagagggagcctgaagtttccgatgcccaactaccaggtggcgttgtttgagaacgaaccggcgggcaccctcatcctccagctgcacgcgcactacaccatcgagggcgaggaggagcgcgtgagctattacatggaggggctgttcgacgagcgctcccggggctacttccgaatcgactctgccacgggcgccgtgagcacggacagcgtactggaccgcgagaccaaggagacgcacgtcctcagggtgaaagccgtggactacagtacgccgccgcgctcggccaccacctacatcactgtcttggtcaaagacaccaacgaccacagcccggtcttcgagcagtcggagtaccgcgagcgcgtgcgggagaacctggaggtgggctacgaggtgctgaccatccgcgccagcgaccgcgactcgcccatcaacgccaacttgcgttaccgcgtgttggggggcgcgtgggacgtcttccagctcaacgagagctctggcgtggtgagcacacgggcggtgctggaccgggaggaggcggccgagtaccagctcctggtggaggccaacgaccaggggcgcaatccgggcccgctcagtgccacggccaccgtgtacatcgaggtggaggacgagaacgacaactacccccagttcagcgagcagaactacgtggtccaggtgcccgaggacgtggggctcaacacggctgtgctgcgagtgcaggccacggaccgggaccagggccagaacgcggccattcactacagcatcctcagcgggaacgtggccggccagttctacctgcactcgctgagcgggatcctggatgtgatcaaccccttggatttcgaggatgtccagaaatactcgctgagcattaaggcccaggatgggggccggcccccgctcatcaattcttcaggggtggtgtctgtgcaggtgctggatgtcaacgacaacgagcctatctttgtgagcagccccttccaggccacggtgctggagaatgtgcccctgggctaccccgtggtgcacattcaggcggtggacgcggactctggagagaacgcccggctgcactatcgcctggtggacacggcctccacctttctggggggcggcagcgctgggcctaagaatcctgcccccacccctgacttccccttccagatccacaacagctccggttggatcacagtgtgtgccgagctggaccgcgaggaggtggagcactacagcttcggggtggaggcggtggaccacggctcgccccccatgagctcctccaccagcgtgtccatcacggtgctggacgtgaatgacaacgacccggtgttcacgcagcccacctacgagcttcgtctgaatgaggatgcggccgtggggagcagcgtgctgaccctgcaggcccgcgaccgtgacgccaacagtgtgattacctaccagctcacaggcggcaacacccggaaccgctttgcactcagcagccagagagggggcggcctcatcaccctggcgctacctctggactacaagcaggagcagcagtacgtgctggcggtgacagcatccgacggcacacggtcgcacactgcgcatgtcctaatcaacgtcactgatgccaacacccacaggcctgtctttcagagctcccattacacagtgagtgtcagtgaggacaggcctgtgggcacctccattgctaccctcagtgccaacgatgaggacacaggagagaatgcccgcatcacctacgtgattcaggaccccgtgccgcagttccgcattgaccccgacagtggcaccatgtacaccatgatggagctggactatgagaaccaggtcgcctacacgctgaccatcatggcccaggacaacggcatcccgcagaaatcagacaccaccaccctagagatcctcatcctcgatgccaatgacaatgcaccccagttcctgtgggatttctaccagggttccatctttgaggatgctccaccctcgaccagcatcctccaggtctctgccacggaccgggactcaggtcccaatgggcgtctgctgtacaccttccagggtggggacgacggcgatggggacttctacatcgagcccacgtccggtgtgattcgcacccagcgccggctggaccgggagaatgtggccgtgtacaacctttgggctctggctgtggatcggggcagtcccactccccttagcgcctcggtagaaatccaggtgaccatcttggacattaatgacaatgcccccatgtttgagaaggacgaactggagctgtttgttgaggagaacaacccagtggggtcggtggtggcaaagattcgtgctaacgaccctgatgaaggccctaatgcccagatcatgtatcagattgtggaaggggacatgcggcatttcttccagctggacctgctcaacggggacctgcgtgccatggtggagctggactttgaggtccggcgggagtatgtgctggtggtgcaggccacgtcggctccgctggtgagccgagccacggtgcacatccttctcgtggaccagaatgacaacccgcctgtgctgcccgacttccagatcctcttcaacaactatgtcaccaacaagtccaacagtttccccaccggcgtgatcggctgcatcccggcccatgaccccgacgtgtcagacagcctcaactacaccttcgtgcagggcaacgagctgcgcctgttgctgctggaccccgccacgggcgaactgcagctcagccgcgacctggacaacaaccggccgctggaggcgctcatggaggtgtctgtgtctgatggcatccacagcgtcacggccttctgcaccctgcgtgtcaccatcatcacggacgacatgctgaccaacagcatcactgtccgcctggagaacatgtcccaggagaagttcctgtccccgctgctggccctcttcgtggagggggtggccgccgtgctgtccaccaccaaggacgacgtcttcgtcttcaacgtccagaacgacaccgacgtcagctccaacatcctgaacgtgaccttctcggcgctgctgcctggcggcgtccgcggccagttcttcccgtcggaggacctgcaggagcagatctacctgaatcggacgctgctgaccaccatctccacgcagcgcgtgctgcccttcgacgacaacatctgcctgcgcgagccctgcgagaactacatgaagtgcgtgtccgttctgcgattcgacagctccgcgcccttcctcagctccaccaccgtgctcttccggcccatccaccccatcaacggcctgcgctgccgctgcccgcccggcttcaccggcgactactgcgagacggagatcgacctctgctactccgacccgtgcggcgccaacggccgctgccgcagccgcgagggcggctacacctgcgagtgcttcgaggacttcactggagagcactgtgaggtggatgcccgctcaggccgctgtgccaacggggtgtgcaagaacgggggcacctgcgtgaacctgctcatcggcggcttccactgcgtgtgtcctcctggcgagtatgagaggccctactgtgaggtgaccaccaggagcttcccgccccagtccttcgtcaccttccggggcctgagacagcgcttccacttcaccatctccctcacgtttgccactcaggaaaggaacggcttgcttctctacaacggccgcttcaatgagaagcacgacttcatcgccctggagatcgtggacgagcaggtgcagctcaccttctctgcaggcgagacaacaacgaccgtggcaccgaaggttcccagtggtgtgagtgacgggcggtggcactctgtgcaggtgcagtactacaacaagcccaatattggccacctgggcctgccccatgggccgtccggggaaaagatggccgtggtgacagtggatgattgtgacacaaccatggctgtgcgctttggaaaggacatcgggaactacagctgcgctgcccagggcactcagaccggctccaagaagtccctggatctgaccggccctctactcctggggggtgtccccaacctgccagaagacttcccagtgcacaaccggcagttcgtgggctgcatgcggaacctgtcagtcgacggcaaaaatgtggacatggccggattcatcgccaacaatggcacccgggaaggctgcgctgctcggaggaacttctgcgatgggaggcggtgtcagaatggaggcacctgtgtcaacaggtggaatatgtatctgtgtgagtgtccactccgattcggcgggaagaactgtgagcaagccatgcctcacccccagctcttcagcggtgagagcgtcgtgtcctggagtgacctgaacatcatcatctctgtgccctggtacctggggctcatgttccggacccggaaggaggacagcgttctgatggaggccaccagtggtgggcccaccagctttcgcctccagatcctgaacaactacctccagtttgaggtgtcccacggcccctccgatgtggagtccgtgatgctgtccgggttgcgggtgaccgacggggagtggcaccacctgctgatcgagctgaagaatgttaaggaggacagtgagatgaagcacctggtcaccatgaccttggactatgggatggaccagaacaaggcagatatcgggggcatgcttcccgggctgacggtaaggagcgtggtggtcggaggcgcctctgaagacaaggtctccgtgcgccgtggattccgaggctgcatgcagggagtgaggatgggggggacgcccaccaacgtcgccaccctgaacatgaacaacgcactcaaggtcagggtgaaggacggctgtgatgtggacgacccctgtacctcgagcccctgtccccccaatagccgctgccacgacgcctgggaggactacagctgcgtctgtgacaaagggtaccttggaataaactgtgtggatgcctgtcacctgaacccctgcgagaacatgggggcctgcgtgcgctcccccggctccccgcagggctacgtgtgcgagtgtgggcccagtcactacgggccgtactgtgagaacaaactcgaccttccgtgccccagaggctggtgggggaaccccgtctgtggaccctgccactgtgccgtcagcaaaggctttgatcccgactgtaataagaccaacggccagtgccaatgcaaggagaattactacaagctcctagcccaggacacctgtctgccctgcgactgcttcccccatggctcccacagccgcacttgcgacatggccaccgggcagtgtgcctgcaagcccggcgtcatcggccgccagtgcaaccgctgcgacaacccgtttgccgaggtcaccacgctcggctgtgaagtgatctacaatggctgtcccaaagcatttgaggccggcatctggtggccacagaccaagttcgggcagccggctgcggtgccatgccctaagggatccgttggaaatgcggtccgacactgcagcggggagaagggctggctgcccccagagctctttaactgtaccaccatctccttcgtggacctcagggccatgaatgagaagctgagccgcaatgagacgcaggtggacggcgccagggccctgcagctggtgagggcgctgcgcagtgctacacagcacacgggcacgctctttggcaatgacgtgcgcacggcctaccagctgctgggccacgtccttcagcacgagagctggcagcagggcttcgacctggcagccacgcaggacgccgactttcacgaggacgtcatccactcgggcagcgccctcctggccccagccaccagggcggcgtgggagcagatccagcggagcgagggcggcacggcacagctgctccggcgcctcgagggctacttcagcaacgtggcacgcaacgtgcggcggacgtacctgcggcccttcgtcatcgtcaccgccaacatgattcttgctgtcgacatctttgacaagttcaactttacgggagccagggtcccgcgattcgacaccatccatgaagagttccccagggagctggagtcctccgtctccttcccagccgacttcttcagaccacctgaagaaaaagaaggccccctgctgaggccggctggccggaggaccaccccgcagaccacgcgcccggggcctggcaccgagagggaggccccgatcagcaggcggaggcgacaccctgatgacgctggccagttcgccgtcgctctggtcatcatttaccgcaccctggggcagctcctgcccgagcgctacgaccccgaccgtcgcagcctccggttgcctcaccggcccatcattaataccccgatggtgagcacgctggtgtacagcgagggggctccgctcccgagacccctggagaggcccgtcctggtggagttcgccctgctggaggtggaggagcgaaccaagcctgtctgcgtgttctggaaccactccctggccgttggtgggacgggagggtggtctgcccggggctgcgagctcctgtccaggaaccggacacatgtcgcctgccagtgcagccacacagccagctttgcggtgctcatggatatctccaggcgtgagaacggggaggtcctgcctctgaagattgtcacctatgccgctgtgtccttgtcactggcagccctgctggtggccttcgtcctcctgagcctggtccgcatgctgcgctccaacctgcacagcattcacaagcacctcgccgtggcgctcttcctctctcagctggtgttcgtgattgggatcaaccagacggaaaacccgtttctgtgcacagtggttgccatcctcctccactacatctacatgagcacctttgcctggaccctcgtggagagcctgcatgtctaccgcatgctgaccgaggtgcgcaacatcgacacggggcccatgcggttctactacgtcgtgggctggggcatcccggccattgtcacaggactggcggtcggcctggacccccagggctacgggaaccccgacttctgctggctgtcgcttcaagacaccctgatttggagctttgcggggcccatcggagctgttataatcatcaacacagtcacttctgtcctatctgcaaaggtttcctgccaaagaaagcaccattattatgggaaaaaagggatcgtctccctgctgaggaccgcattcctcctgctgctgctcatcagcgccacctggctgctggggctgctggctgtgaaccgcgatgcactgagctttcactacctcttcgccatcttcagcggcttacagggccccttcgtcctccttttccactgcgtgctcaaccaggaggtccggaagcacctgaagggcgtgctcggcgggaggaagctgcacctggaggactccgccaccaccagggccaccctgctgacgcgctccctcaactgcaacaccaccttcggtgacgggcctgacatgctgcgcacagacttgggcgagtccaccgcctcgctggacagcatcgtcagggatgaagggatccagaagctcggcgtgtcctctgggctggtgaggggcagccacggagagccagacgcgtccctcatgcccaggagctgcaaggatccccctggccacgattccgactcagatagcgagctgtccctggatgagcagagcagctcttacgcctcctcacactcgtcagacagcgaggacgatggggtgggagctgaggaaaaatgggacccggccaggggcgccgtccacagcacccccaaaggggacgctgtggccaaccacgttccggccggctggcccgaccagagcctggctgagagtgacagtgaggaccccagcggcaagccccgcctgaaggtggagaccaaggtcagcgtggagctgcaccgcgaggagcagggcagtcaccgtggagagtaccccccggaccaggagagcgggggcgcagccaggcttgctagcagccagcccccagagcagaggaaaggcatcttgaaaaataaagtcacctacccgccgccgctgacgctgacggagcagacgctgaagggccggctccgggagaagctggccgactgtgagcagagccccacatcctcgcgcacgtcttccctgggctctggcggccccgactgcgccatcacagtcaagagccctgggagggagccggggcgtgaccacctcaacggggtggccatgaatgtgcgcactgggagcgcccaggccgatggctccgactctgagaaaccgtgaggcaagcccgtcaccccacacaggctgcggcatcaccctcagaccttggagcccaaggggccactgcccttgaagtggagtgggcccagagtgtggcggtccccatggtggcagccccccgactgatcatccagacacaaaggtcttggttctcccaggagctcagggcctgtcagacctggtgacaagtgccaaaggccacaggcatgagggaggcgtggaccactgggccagcaccgctgagtcctaagactgcagtcaaagccagaactgagaggggaccccagactgggcccagaggctggccagagttcaggaacgccgggcacagaccaaagaccgcggtccagccccgcccaggcgggcatctcatggcagtgcggacccgtggctggcagcccgggcagtcctttgcaaaggcaccccttgtcttaaaatcacttcgctatgtgggaaaggtggagatacttttatatatttgtatgggactctgaggaggtgcaacctgtatatatattgcattcgtgctgactttgttatcccgagagatccatgcaatgatctcttgctgtcttctctgtcaagattgcacagttgtacttgaatctggcatgtgttgacgaaactggtgccccagcagatcaaaggtgggaaatacgtcagcagtggggctaaaaccaagcggctagaagccctacagctgccttcggccaggaagtgaggatggtgtgggccctccccgccggccccctgggtccccagtgttcgctgtgtgtgcgtttgtcctctgctgccatctgccccggctgtgtgaattcaagacagggcagtgcagcactaggcaggtgtgaggagccctgctgaggtcactgtggggcacggttgccacacggctgtcatttttcacctggtcattctgtgaccaccaccccctcccctcaccgcctcccaggtggcccgggagctgcaggtggggatggctttgtcctttgctcctgctccccgtgggacctgggaccttaaagcgttgcaggttcctgatttggacagaggtgtggggccttccaggccgttacatacctcctgccaattctctaactctctgagactgcgaggatctccaggcagggttctcccctctggagtctgaccaattacttcattttgcttcaaatggccaattgtgcagagggacaaagccacagccacactcttcaacggttaccaaactgtttttggaaattcacaccaaggtcgggcccactgcaggcagctggcacagcgtggcccgaggggctgtggaacgggtcccggaactgtcagacatgtttgattttagcgtttcctttgttcttcaaatcaggtgcccaaataagtgatcagcacagctgcttccaaataggagaaaccataaaataggatgaaaatcaagtaaaatgcaaagatgtccacactgttttaaacttgaccctgatgaaaatgtgagcactgttagcagatgcctatgggagaggaaaagcgtatctgaaaatggtccaggacaggaggatgaaatgagatcccagagtcctcacacctgaatgaattatacatgtgccttaccaggtgagtggtctttcgaagataaaaaactctagtccctttaaacgtttgcccctggcgtttcctaagtacgaaaaggtttttaagtcttcgaacagtctcctttcatgactttaacaggattctgccccctgaggtgtaatttttttgttctatttttttccacgtactccacagccaacatcacgaggtgtaatttttaatttgatcagaactgttaccaaaaaacaactgtcagttttattgagatgggaaaaatgtaaacctatttttattacttaagactttatgggagagattagacactggaggtttttaacagaacgtgtatttattaatgttcaaaacactggaattacaaatgagaagagtctacaataaattaagatttttgaatttgtacttctgcggtgctggtttttctccacaaacacccccgcccctccccatgcccagggtggccgtggaagggacggtttacggacgtgcagctgagctgtccgtgtcccatgctccctcagccagtggaacgtgccggaactttttgtccattccctagtaggcctgccacagcctagatgggcagtttttgtctttcaccaaatttgaggactttttttttttgccattatttcttcagttttcttttcttgcactgatctttctcctctccttctgtgactccagtgactcagacgttagacctcttgatgttttcccactggtccctgaggctctgttc

SEQ ID NO: 138 - DNA, 3634 bp, Homo sapiens
ggacgggacggagccggggcagccagaagaggtgggaaaagcggaggaggacgcccaggaggaggcggcggcggcggccgggaagtgaaaggtctcgcaaagttcagcggcggctgcgggcgccgagccccgggctagcggcagacgagcccgcagggccgctccgcggggcagcgcagccaggccggctatggtcccggggctcccgccgccccccaggtgcccgggacccgccaggccggtgcgcgagggtcaccccacctccccgcgcggtcccggcccctggctcccagctgccggcgaccgctgaccgagcccggcgccccaggaggaggaagaaaccagggccccgttccctcccgaggacggcggcgcttcatcccgcagcccagaggtctcggctccctccggcacccgcccggcccggctgctcccggctcctcccggccatggggagctgcgcgcggctgctgctgctctggggctgcacggtggtggccgcaggactgagtggagtagctggagtgagttcccgctgtgaaaaagcctgcaaccctcggatgggaaatttggctttggggcgaaaactctgggcagacaccacctgcggtcagaatgctaccgaactgtactgcttctacagtgagaacacggatctgacttgtcggcagcccaaatgtgacaagtgcaatgctgcctatcctcacctggctcacctgccatctgccatggcagactcatccttccggtttcctcgcacatggtggcagtctgcggaggatgtgcacagagaaaagatccagttagacctggaagctgaattctacttcactcacctaattgtgatgttcaagtcccccaggccggctgccatggtgctggaccgctcccaggactttgggaaaacatggaagccttataagtactttgcgactaactgctccgctacatttggcctggaagatgatgttgtcaagaagggcgctatttgtacttctaaatactccagtccttttccatgcactggaggagaggttattttcaaagctttgtcaccaccatacgatacagagaacccttacagtgccaaagttcaggagcagctgaagatcaccaaccttcgcgtgcagctgctgaaacgacagtcttgtccctgtcagagaaatgacctgaacgaagagcctcaacattttacacactatgcaatctatgatttcattgtcaagggcagctgcttctgcaatggccacgctgatcaatgcatacctgttcatggcttcagacctgtcaaggccccaggaacattccacatggtccatgggaagtgtatgtgtaagcacaacacagcaggcagccactgccagcactgtgccccgttatacaatgaccggccatgggaggcagctgatggcaaaacgggggctcccaacgagtgcagaacctgcaagtgtaatgggcatgctgatacctgtcacttcgacgttaatgtgtgggaggcatcagggaatcgtagtggtggtgtctgtgatgactgtcagcacaacacagaaggacagtattgccagaggtgcaagccaggcttctatcgtgacctgcggagacccttctcagctccagatgcttgcaaaccgtgttcctgccatccagtaggatcagctgtccttcctgccaactcagtgaccttctgcgaccccagcaatggtgactgcccttgcaagcctggggtggcagggcgacgttgtgacaggtgcatggtgggatactggggcttcggagactatggctgtcgaccatgtgactgtgcggggagctgtgaccctatcaccggagactgcatcagcagccacacagacatagactggtatcatgaagttcctgacttccgtcccgtgcacaataagagcgaaccagcctgggagtgggaggatgcgcaggggttttctgcacttctacactcaggtaaatgcgaatgtaaggaacagacattaggaaatgccaaggcattctgtggaatgaaatattcatatgtgctaaaaataaagattttatcagctcatgataaaggtactcatgttgaggtcaatgtgaagattaaaaaggtcttaaaatctaccaaactgaagattttccgaggaaagcgaacattatatccagaatcatggacggacagaggatgcacttgtccaatcctcaatcctggtttggaataccttgtagcaggacatgaggatataagaacaggcaaactaattgtgaatatgaaaagctttgtccagcactggaaaccttctcttggaagaaaagtcatggatattttaaaaagagagtgcaagtagcattaagatggatagcacataatggcacttgtctatgtacaaaacacaaactttagagcaagaagacctcagacaggaaactggaattttttaaagtgccaaaacatatagaaatgtttgaatgcatgggtcttatctaacttatctcttctggacccatgtttaaatacagttttatttcatgaagagaaatgaaaacccctacactgatatctgttttctatgggactgattctgaaattcttaactattaagaatattttaatagcagcatgacatttagcagtaatccattaagggcagtacctctaacaaggacgccttccagcttcagcgatgttacttacgtttgatgctacttaaagtaatgaatgacgttttaaggaatccctaaccctactatcagaaaaggtgtttgttaaagagccttctcttgtgtgttacgcatgaactttggtctgtaggtgttaaatggaacctctccatgtgtatatagtatttccttgtataaagcactttactacctaccacttgtgttgtgaacgtttggtgactgctgttgaaagaaggaaaagggtgtgtgagaaagcctactgaagcagcagcactgccactacatgtggacaaaagtgaccatataaaagaagttgtgctatttaactctgaatacttggagaaactaggtgaagatgcaaccagaaaggagaatatgtatgcgtgaagtctcagctttgagctggaggctagattccaagatgacagccatgatgaaactttttaaaaaactaaaccagaagagactttaaaataagagaaagaaatcataaatgtagacatatgcttggctaaaggggaaatggactttaaattttaaagagctcatttgcaatgcacttgtatacacttcaaaaattattgtagacacagaatttgttatatttttgtgcttagtatttaaacctgaacattgaaacagttttcctccttgtctttcttaacagtaatagtcattatatttacctgttttttaacacaatgtatgtgatagtcaaaaaatcacagtttttcattattattcatcttctgtacccacgcataaccactatacatagtttcttttgtacttgaatatacaaaacatgaacacagtgccatatgaataatttcacatacagaacctttttttctctgaagtcctgtggacttgcaaatatatatatatattgctttgttaatttgtttttatatttcatatatgtaataaaggaatatgatctgaaaaaaaaaaaaaaaaaaaa

SEQ ID NO: 139 - DNA, 3955 bp, Homo sapiens
gggtggagggcccgggcgctcgggcctcaccagcccgagccaacttgcgctagagtcgggcccgccccctaaggggttaatccttttctcatgttaccgagcggcttataaggagggggaggccaagcctccgccttattgggagcctttgggggtttattctcttcccttctaacttgacagggtcttgctctgtcattcaggcaagagtgcagtagtgtgatcacttcttactgccgcctcaagcttccagcctcaactcaagcaatcctcccacctcagccacccaagtggctgggactacagattaagaatgacccaaaataaattaaagctttgttccaaagccaatgtgtatactgaagtgcctgatggaggatggggctgggcggtagctgtttcatttttcttcgttgaagtcttcacctacggcatcatcaagacatttggtgtcttctttaatgacttaatggacagttttaatgaatccaatagcaggatctcatggataatctcaatctgtgtgtttgtcttaacattttcagctcccctcgccacagtcctgagcaatcgtttcggacaccgtctggtagtgatgttgggggggctacttgtcagcaccgggatggtggccgcctccttctcacaagaggtttctcatatgtacgtcgccatcggcatcatctctggtctgggatactgctttagttttctcccaactgtaaccatcctatcacaatattttggcaaaagacgttccatagtcactgcagttgcttccacaggagaatgtttcgctgtgtttgctttcgcaccagcaatcatggctctgaaggagcgcattggctggagatacagcctcctcttcgtgggcctactacagttaaacattgtcatcttcggagcactgctcagacccatctttatcagaggaccagcgtcaccgaaaatagtcatccaggaaaatcggaaagaagcgcagtatatgcttgaaaatgagaaaacacgaacctcaatagactccattgactcaggagtagaactaactacctcacctaaaaatgtgcctactcacactaacctggaactggagccgaaggccgacatgcagcaggtcctggtgaagaccagccccaggccaagcgaaaagaaagccccgctattagacttctccattttgaaagagaaaagttttatttgttatgcattatttggtctctttgcaacactgggattctttgcaccttccttgtacatcattcctctgggcattagtctgggcattgaccaggaccgcgctgcttttttattatctacgatggccattgcagaagttttcggaaggatcggagctggttttgtcctcaacagggagcccattcgtaagatttacattgagctcatctgcgtcatcttattgactgtgtctctgtttgcctttacttttgctactgaattctggggtctaatgtcatgcagcatattttttgggtttatggttggaacaataggagggactcacattccactgcttgctgaggatgatgtcgtgggcattgagaagatgtcttctgcagctggggtctacatcttcattcagagcatagcaggactggctggaccgccccttgcaggtttgttggtggaccaaagtaagatctacagcagggccttctactcctgcgcagctggcatggccctggctgctgtgtgcctcgccctggtgagaccgtgtaagatgggactgtgccagcatcatcactcaggtgaaacaaaggtagtgagccatcgtgggaagactttacaggacatacctgaagactttctggaaatggatcttgcaaaaaatgagcacagagttcacgtgcaaatggagccggtatgacacactttcttacaacaacagccactgtgttggctggagagggatggggtgggcccaacggggacacaaggaggcagaggagctaacccctctactccactttcaaaactacattttaaagggaatgtgtatgtgaagagcactaccaacatcgcttttgttttgttttgttttgttttaagctttttttttttgcttgtttttaaagccaaaacaaaaaacaaccaagcactcttccatatataaatctggctgtattcagtagcaatacaagagatatgtagaaagactctttggttcacattccgatattaaaatagtgacatgaactggcaaagtggttttaaaagctttcacgtgggataaatgattttctttttttcttttctttcttcctatggtcttgtctgaataaactactctcctgaataaaacaacatccaacccaggtcattgaaatgaaattggccagtcaaaaaaaaaaagacttcaatcatttttaaaattcctaattttcagaaatatgaataaatagtttttgttaaaccctttgtaaaataccaaggttcccgttaacaaattacggcctctgcttgctggaaatgaaatatagtttaagaccaaacattttactaataaacaaattttaagtatatatatatatatataacttgaacttcataaatgtgaagattaccacttctttttatggccagtccttatcagaagtgtttcagtacagaatatacaaaatggcatttaaaaatgtgtttcctgttgcttttagttatacagaaatatgtgactgtagtgtctttaatttaaaccgctatttattattaagttattctaggatgattaaagtaatcaaaagaaataaaatctgagacataagcagcatttttacctcctttctgcaatcctttaaatgcctcacagaatacgtcttatcttgtaaaaatactttcataaaaggccaagttgtcatgattcttccatttgattaggggcaacgtgtgctattaaaggggaaaaaataatggattgcaaatcgccttagctttcaaaactaatttgttttatcatttaagaatacttgaggaacttctttgatcagaattatatttcagagaattgttaaagcatttctgatttaaagaaaaaaccatctaattattgaagcatttctgtatttcacatgggggtaacagagacaattatgttatagcgagttacaagttgcaatttacatcttctataacacatgacttgattggtctaagttgccagaggtatcgggtaactggtcattgttttgttttgtttgttttattcttcctttttttttggagtcacactacatgtatagtattgctcacgttagcagttttctgtaaggagggcaagtgtcaggataataggtggactttttactcacctattttaccacaatctcaccctgcaggtgatggtcaatgcttgctgctccatctttattcatcgttaatgttaatttatgacaactcagggggaaaaacataacaagcctagtttggttacaggtacacacaagcttgaatatttctctgcactgaaatgaaagtggcatagttcatcaccacctgctacattttgtagagcatcttatcagccatagaaataggacaatctataaaactttggggagggtgggggaggaaatgacaaagtgtctgtcaaaaacaggcataatctaaaacaaggtggatgtagcaaatctctgtcactgcttgagaactttgagcttgtggcagttttgcagacttacatgacttcagcactttacgacatattttttactatgaatgttcaatacaatttaatatttataactgatttctgagggatctgctccatgtctattctgttatctgcatgaaaacaaaatgtatgccaatttcagtatgtcaataatcaaggttttaaatgtttggaagaaaatacaaacaagattgctgatctgttctgtattagtgacattctggtacttctagatttgcaataaatttatggattttttatttaaagaga

SEQ ID NO: 140 - DNA, 2514 bp, Homo sapiens
aggaagaggataaaagccagatctcctttgataacctcactccaagtgggacgctggggaaagactaccataagtcagtggaggtttttcccttaaaggcaagaaaatctatggaaagagaaggctacgagtcctcgggcaatgatgactacaggggtagttacaacaccgtgctctcacagcctttatttgaaaagcaggacagagaaggtccagcctccacgggaagcaaactcaccattcaggaacatctgtaccccgcgccttcatcacctgagaaagaacagctgctggaccgcagacccactgaatgtatgatgtcgcgatcagtagatcacctcgagagacctacgtccttcccacggcccggccagttaatctgctgcagttctgtcgaccaggtcaatgacagcgtttacaggaaagtactgcctgccttggtcatcccggctcattatatgaaactccccggggaccactcctatgtcagccagcccctcgtcgtcccggctgatcagcagcttgagatagaaagactacaggctgagctgtccaatccccatgccgggatcttcccacacccgtcctcacagatccagccccagcccctgtcttcccaggccatctctcagcagcacctgcaggatgcgggcacccgggagtggagccctcagaacgcatccatgtcggagtctctctccatcccagcttccctgaacgacgcggctttggctcagatgaacagtgaggtgcagctcctgactgaaaaggccctgatggagcttgggggtgggaagccgcttccgcacccccgggcgtggttcgtctccttggatggcaggtccaacgctcacgttagacattcatacgttgatctccaaagagctggaaggaacggaagtaatgatgccagtttggactctggcgtagatatgaatgaaccaaaatcagcccggaagggaaggggagatgctttgtctctgcagcagaactacccgcccgtccaagagcaccagcagaaagagcctcgagccccagacagcacggcctacacgcagctcgtgtacctggatgacgtggaacagagtggtagcgaatgtgggaccacggtctgtacccccgaggacagtgccctgcgatgcttgttggaggggtcgagtcggagaagtggtggccagctgcccagcctgcaggaggagacgaccagacggactgcggatgccccctcggagccagcagccagcccccaccagagaagatctgcccacgaggaagaggaagacgatgatgatgatgaccaaggagaagacaagaaaagcccctggcagaaacgggaggagaggcccctgatggcgtttaacattaaatgagctatcgcagacccacctgactgtggaatataaaattgccaaatatcctttctcatggaagcgcgtacccgttcgtggaggaaacggaacggcagcccagccgtgggacggacgtggacgtttactgcattcctgtttgccgtgtaaatgttagaaaggaattaaagttattactcggaataaaggatgactttggcggatgtcgcccctgcaaggaggtggctgaaagtggtgtccagatgtccttccgaggactcggcgtatccgccaccagggacattaagaaaccgcacgtgatgtcgctatgctctaacgatcacctcagttctccctcggattctgggaacagatgaaactttttgcatcgcttgagtcatttttatcacaataatcctactgtgaagctgtcgttgagaacttaggttggcacgtagcgtctcaaggtatgcgttctctcaaaggaaagctatgcatcgctgcttcgttgtctgattttgcttagattttgctttggttaggttgcgttttggggtttgcctttttttgttgtcgcttaaatgcaatttggttgtaaagatttgattcctttgtgttcatctgttccgcttctcagcggtccatctcagcgtctcccttcaggaaccgctgagtgtcctctcttaacatccaagccttttaatgaaatcgtactgaaatctgtatcagctaagagtcctccaatcctggtcccattaactccaagtgcctttttgacagtgacaacagacagtccctcgctttttgttgttgttggttttcttaacccctttaatggaactgcctggattttatacagttattaaaggatgtctcttttgctttaaactgcatgctgccaagtgccatttggggtcagcatcctcgtttcaacacagtgtgctctctagttatcatgtgtaacgtgggttctgtttagcgaagatagactagaggacacgttagagatgcccttccctgctccatccctgtggcaccattatggttttttggctgtttgtatatacggttacgtattaactctggaatcctatgggctcatcttgctcacccaatgtgggagtctggtttgagcaagcgagctgaatgtgactattaaaaaaaattt

SEQ ID NO: 141 - DNA, 2021 bp, Homo sapiens
ggcccggacgggacgtgcgcgctcaaaggttgcccgtctctgacgcccgcatttcctggtctggagccggctgagccacagcagggtcgccgcggggtcccggggccgtgctcccctgcccctcccgggagcgcgcggggcggggcggggcggggcgggaccaggcgggcgagctgggccctcgcccctccctcgggcggtcacctgggcacgggcgctgcaggtgtcggggcctcaaccttgcggagccgacagccatcgatcctcgggtggcctcgaggtggtggcagggccgccccctgcagtccggagacgaacgcacggaccgggcctccggaggcaggttcggctggaaggaaccgctctcgcttcgtcctacacttgcgcaaatgtctccgagcttactcacatagcatattggtatatcaaaatgaaatgcaaggaaccaaaaataacataattgaaggcagtaaaagtgaaattaaataggaagatcatcagtcaaggaagacccactggagaggacagaaaatgaagcagtgttttatcatgtgtatttcagcaggtcttcttgaaatttaactaaaaatatgactgctctctcttcagagaactgctcttttcagtaccagttacgtcaaacaaaccagcccctagatgttaactatctgctattcttgatcatacttgggaaaatattattaaatatccttacactaggaatgagaagaaaaaacacctgtcaaaattttatggaatatttttgcatttcactagcattcgttgatcttttacttttggtaaacatttccattatattgtatttcagggattttgtacttttaagcattaggttcactaaataccacatctgcctatttactcaaattatttcctttacttatggctttttgcattatccagttttcctgacagcttgtatagattattgcctgaatttctctaaaacaaccaagctttcatttaagtgtcaaaaattattttatttctttacagtaattttaatttggatttcagtccttgcttatgttttgggagacccagccatctaccaaagcctgaaggcacagaatgcttattctcgtcactgtcctttctatgtcagcattcagagttactggctgtcatttttcatggtgatgattttatttgtagctttcataacctgttgggaagaagttactactttggtacaggctatcaggataacttcctatatgaatgaaactatcttatattttcctttttcatcccactccagttatactgtgagatctaaaaaaatattcttatccaagctcattgtctgttttctcagtacctggttaccatttgtactacttcaggtaatcattgttttacttaaagttcagattccagcatatattgagatgaatattccctggttatactttgtcaatagttttctcattgctacagtgtattggtttaattgtcacaagcttaatttaaaagacattggattacctttggatccatttgtcaactggaagtgctgcttcattccacttacaattcctaatcttgagcaaattgaaaagcctatatcaataatgatttgttaatattattaattaaaagttacagctgtcataagatcataattttatgaacagaaagaactcaggacatattaaaaaataaactgaactaaaacaacttttgccccctgactgatagcatttcagaatgtgtcttttgaagggctatgataccagttattaaatagtgttttattttaaaaacaaaataattccaagaagtttttatagttattcagggacactatattacaaatattactttgttattaacacaaaaagtgataagagttaacatttggctatactgatgtttgtgttactcaaaaaaactactggatgcaaactgttatgtaaatctgagatttcactgacaactttaagatatcaacctaaacatttttattaaatgttcaaatgaaagcaagaaaaaaaaaa

SEQ ID NO: 142 - DNA, 1054 bp, Homo sapiens
gccaaaacagtgggggctgaactgacctctcccctttgggagagaaaaactgtctgggagcttgacaaaggcatgcaggagagaacaggagcagccacagccaggagggagagccttccccaagcaaacaatccagagcagctgtgcaaacaacggtgcataaatgaggcctcctggaccatgaagcgagtcctgagctgcgtcccggagcccacggtggtcatggctgccagagcgctctgcatgctggggctggtcctggccttgctgtcctccagctctgctgaggagtacgtgggcctgtctgcaaaccagtgtgccgtgccagccaaggacagggtggactgcggctacccccatgtcacccccaaggagtgcaacaaccggggctgctgctttgactccaggatccctggagtgccttggtgtttcaagcccctgcaggaagcagaatgcaccttctgaggcacctccagctgcccccggccgggggatgcgaggctcggagcacccttgcccggctgtgattgctgccaggcactgttcatctcagcttttctgtccctttgctcccggcaagcgcttctgctgaaagttcatatctggagcctgatgtcttaacgaataaaggtcccatgctccacccgaggacagttcttcgtgcctgagactttctgaggttgtgctttatttctgctgcgtcgtgggagagggcgggagggtgtcaggggagagtctgcccaggcctcaagggcaggaaaagactccctaaggagctgcagtgcatgcaaggatattttgaatccagactggcacccacgtcacaggaaagcctaggaacactgtaagtgccgcttcctcgggaaagcagaaaaaatacatttcaggtagaagttttcaaaaatcacaagtctttcttggtgaagacagcaagccaataaaactgtcttccaaagtggtcctttatttcacaaccactctcgctactgttcaatacttgtactattcctgggttttgtttctttgtacagtaaacattatgaacaaacaggca

SEQ ID NO: 143 - DNA, 2215 bp, Homo sapiens
aggctgccgggggctgcagacatggagggccagagcagcaggggcagcaggaggccagggacccgggctggcctgggttccctgcccatgccccagggtgttgcccaaactggggcaccctccaaggtggactcaagttttcagctcccagcaaagaagaacgcagccctaggaccctcggaaccaaggatcactgtggtcacatggaacgtgggcactgccatgcccccagacgatgtcacatccctcctccacctgggcggtggtgacgacagcgacggcgcagacatgatcgccatagggttgcaggaagtgaactccatgctcaacaagcgactcaaggacgccctcttcacggaccagtggagtgagctgttcatggatgcgctagggcccttcaacttcgtgctggtgagttcagtgaggatgcagggtgtcatcctgctgctgttcgccaagtactaccacctgcccttcctgcgagacgtgcagaccgactgcacgcgcactggcctgggcggctactggggtaacaagggtggcgtgagcgtgcgcctggcggccttcgggcacatgctctgcttcctgaactgccacttgcctgcgcatatggacaaggcggagcagcgcaaagacaacttccagaccatcctcagcctccagcagttccaagggccgggcgcacagggcatcctggatcatgacctcgtgttctggttcggggacctgaacttccgcattgagagctatgacctgcactttgtcaagtttgccatcgacagtgaccagctccatcagctctgggagaaggaccagctcaacatggccaagaacacctggcccattctgaagggctttcaggaggggcccctcaacttcgctcccaccttcaagtttgatgcgggtaccaacaaatacgataccagtgccaagaaacggaagccagcttggacagaccgtatcctatggaaggtcaaggctccaggtgggggtcccagcccctcaggacggaagagccaccgactccaggtgacgcagcacagctaccgcagccacatggaatacacagtcagcgaccacaagcctgtggctgcccagttcctcctgcagtttgccttcagggacgacatgccactggtgcggctggaggtggcagatgagtgggtgcggcccgagcaggcggtggtgaggtaccgcatggaaacagtgttcgcccgcagctcctgggactggatcggcttataccgggtgggtttccgccattgcaaggactatgtggcttatgtctgggccaaacatgaagatgtggatgggaatacctaccaggtaacattcagtgaggaatcactgcccaagggccatggagacttcatcctgggctactatagtcacaaccacagcatcctcatcggcatcactgaacccttccagatctcgctgccttcctcggagttggccagcagcagcacagacagctcaggcaccagctcagagggagaggatgacagcacactggagctccttgcacccaagtcccgcagccccagtcctggcaagtccaagcgacaccgcagccgcagcccgggactggccaggttccctgggcttgccctacggccctcatcccgtgaacgccgtggtgccagccgtagcccctcaccccagagccgccgcctgtcccgagtggctcctgacaggagcagtaatggcagcagccggggcagtagtgaagaggggccctctgggttgcctggcccctgggccttcccaccagctgtgcctcgaagcctgggcctgttgcccgccttgcgcctagagactgtagaccctggtggtggtggctcctggggacctgatcgggaggccctggcgcccaacagcctgtctcctagtccccagggccatcgggggctggaggaagggggcctggggccctgagggtggggtaggcagatgggccaaggtgaccaccattctgcctcaatcttttgcaagcccacctgcctctctcctgctgctcctccagctgtatctgcacctgcctctctgtcctggccaggggtggacaactggggtcccccaaaactcagtcctggcacctcaactgtgacaatcagcaaagccccacccaggcccccatctgggatgatgggagagctctggcagatgtcccaatcctggaggtcatccattaggaattaaattctccagcctc

SEQ ID NO: 144 - DNA, 5946 bp, Homo sapiens
ttttttttttttttttgcttaaaaaaaagccatgacggctctcccacaattcatcttccctgcgccatctttgtattatttctaatttattttggatgtcaaaaggcactgatgaagatattttctctggagtctccttctttctaacccggctctcccgatgtgaaccgagccgtcgtccgcccgccgccgccgccgccgccgccgccgcccgccccgcagcccaccatgtctcgccgcaagcaaggcaaaccccagcacttaagcaaacgggaattctcgcccgagcctcttgaagccattcttacagatgatgaaccagaccacggcccgttgggagctccagaaggggatcatgacctcctcacctgtgggcagtgccagatgaacttcccattgggggacattcttatttttatcgagcacaaacggaaacaatgcaatggcagcctctgcttagaaaaagctgtggataagccaccttccccttcaccaatcgagatgaaaaaagcatccaatcccgtggaggttggcatccaggtcacgccagaggatgacgattgtttatcaacgtcatctagaggaatttgccccaaacaggaacacatagcagataaacttctgcactggaggggcctctcctcccctcgttctgcacatggagctctaatccccacgcctgggatgagtgcagaatatgccccgcagggtatttgtaaagatgagcccagcagctacacatgtacaacttgcaaacagccattcaccagtgcatggtttctcttgcaacacgcacagaacactcatggattaagaatctacttagaaagcgaacacggaagtcccctgaccccgcgggttggtatcccttcaggactaggtgcagaatgtccttcccagccacctctccatgggattcatattgcagacaataacccctttaacctgctaagaataccaggatcagtatcgagagaggcttccggcctggcagaagggcgctttccacccactccccccctgtttagtccaccaccgagacatcacttggacccccaccgcatagagcgcctgggggcggaagagatggccctggccacccatcacccgagtgcctttgacagggtgctgcggttgaatccaatggctatggagcctcccgccatggatttctctaggagacttagagagctggcagggaacacgtctagcccaccgctgtccccaggccggcccagccctatgcaaaggttactgcaaccattccagccaggtagcaagccgcccttcctggcgacgccccccctccctcctctgcaatccgcccctcctccctcccagcccccggtcaagtccaagtcatgcgagttctgcggcaagacgttcaaatttcagagcaacctggtggtgcaccggcgcagccacacgggcgagaagccctacaagtgcaacctgtgcgaccacgcgtgcacccaggccagcaagctgaagcgccacatgaagacgcacatgcacaaatcgtcccccatgacggtcaagtccgacgacggtctctccaccgccagctccccggaacccggcaccagcgacttggtgggcagcgccagcagcgcgctcaagtccgtggtggccaagttcaagagcgagaacgaccccaacctgatcccggagaacggggacgaggaggaagaggaggacgacgaggaagaggaagaagaggaggaagaggaggaggaggagctgacggagagcgagagggtggactacggcttcgggctgagcctggaggcggcgcgccaccacgagaacagctcgcggggcgcggtcgtgggcgtgggcgacgagagccgcgccctgcccgacgtcatgcagggcatggtgctcagctccatgcagcacttcagcgaggccttccaccaggtcctgggcgagaagcataagcgcggccacctggccgaggccgagggccacagggacacttgcgacgaagactcggtggccggcgagtcggaccgcatagacgatggcactgttaatggccgcggctgctccccgggcgagtcggcctcggggggcctgtccaaaaagctgctgctgggcagccccagctcgctgagccccttctctaagcgcatcaagctcgagaaggagttcgacctgcccccggccgcgatgcccaacacggagaacgtgtactcgcagtggctcgccggctacgcggcctccaggcagctcaaagatcccttccttagcttcggagactccagacaatcgccttttgcctcctcgtcggagcactcctcggagaacgggagtttgcgcttctccacaccgcccggggagctggacggagggatctcggggcgcagcggcacgggaagtggagggagcacgccccatattagtggtccgggcccgggcaggcccagctcaaaagagggcagacgcagcgacacttgtgagtactgtgggaaagtcttcaagaactgtagcaatctcactgtccacaggagaagccacacgggcgaaaggccttataaatgcgagctgtgcaactatgcctgtgcccagagtagcaagctcaccaggcacatgaaaacgcatggccaggtggggaaggacgtttacaaatgtgaaatttgtaagatgccttttagcgtgtacagtaccctggagaaacacatgaaaaaatggcacagtgatcgagtgttgaataatgatataaaaactgaatagaggtatattaatacccctccctcactcccacctgacaccccctttttcaccactccccttccccatcgccctccagccccactccctgtaggatttttttctagtcccatgtgatttaaacaaacaaacaaacaaacagaagtaacgaagctaagaatatgagagtgcttgtcaccagcacacctgttttttttctttttctttttcttttttctttttccttttttttttttttcctttatgttctcaccgtttgaatgcatgatctgtatggggcaatactattgcattttacgcaaactttgagcctttctcttgtgcaataatttacatgttgtgtatgtttttttttaaacttagacagcatgtatggtatgttatggctattttaaattgtccctaattcgttgctgagcaaacatgttgctgtttccagttccgttctgagagaaaaagagagagagagagaaaaagaccatgctgcatacattctgtaatacatatcatgtacagttttattttataacgtgaggaggaaaaacagtctttggattaaccctctatagacagaatagatagcactgaaaaaaaatctctatgagctaaatgtctgtctctaaagggttaaatgtatcaattggaaaggaagaaaaaaggccttgaattgacaaattaacagaaaaacagaacaagtttattctatcatttggttttaaaatatgagtgccttggatctattaaaaccacatcgatggttctttctacttgttataaacttgtagcttaattcagcattgggtgaggtaataaaccttaggaactagcatataattctatattgtatttctcacaacaatggctacctaaaaagatgacccattatgtcctagttaatcatcatttttcctttagtttaattttataaacaaaactgattataccagtataaaagctactttgctcctggtgagagcttaaaagaaatgggctgttttgcccaaagttttattttttttaaacaatgattaaattgaatgtgtaatgtgcaaaagccctggaacgcaattaaatacactagtaaggagttcattttatgaagatatttgctttaataatgtctttttaaaaatactggcaccaaaagaaatagatccagatctacttggttgtcaagtggacaatcaaatgataaactttaagaccttgtataccatattgaaaggaagaggctgacaataaggtttgacagaggggaacagaagaaaataatatgatttattagcacaacgtggtactatttgccatttaaaactagaacaggtatataagctaatattgatacaatgatgattaactatgaattcttaagacttgcatttaaatgtgacattcttaaaaaaagaagagaaagaattttaagagtagcagtatatatgtctgtgctccctaaaagttgtacttcatttcttttccatacactgtgtgctatttgtgttaacatggaagaggattcattgtttttatttttatttttttaattttttcttttttattaagctagcatctgccccagttggtgttcaaatagcacttgactctgcctgtgatatctgtatcttttctctaatcagagatacagaggttgagtataaaataaacctgctcagataggacaattaagtgcactgtacaattttcccagtttacaggtctatacttaagggaaaagttgcaagaatgctgaaaaaaaattgaacacaatctcattgaggagcattttttaaaaactaaaaaaaaaaaaactttgccagccatttacttgactattgagcttacttacttggacgcaacattgcaagcgctgtgaatggaaacagaatacacttaacatagaaatgaatgattgctttcgcttctacagtgcaaggatttttttgtacaaaacttttttaaatataaatgttaagaaaaattttttttaaaaaacacttcattatgtttaggggggaactgcattttagggttccattgtcttggtggtgttacaagacttgttatccatttaaaaatggtagtggaaattctatgccttggatacacaccgctcttcaggttgtaaaaaaaaaaaacatacattggggaaaggtttaagattatatagtacttaaatataggaaaatgcacactcatgttgattcctatgctaaaatacatttatggtcttttttctgtatttctagaatggtatttgaattaaatgttcatctagtgttaggcactatagtatttatattgaagcttgtatttttaactgttgcttgttctcttaaaaggtatcaatgtaccttttttggtagtggaaaaaaaaaagacaggctgccacagtatatttttttaatttggcaggataatatagtgcaaattatttgtatgcttcaaaaaaaaaaaaaagagagaaacaaaaaagtgtgacattacagatgagaagccatataatggcggtttgggggagcctgctagaatgtcacatggatggctgtcataggggttgtacatatccttttttgttcctttttcctgctgccatactgtatgcagtactgcaagctaataacgttggtttgttatgtagtgtgctttttgtccctttccttctatcaccctacattccagcatcttaccttcatatgcagtaaaagaaagaaagaaaaaaaaaggaaaaaaaaaaaaaaaccaatgttttgcagtttttttcattgccaaaaactaaatggtgctttatatttagattggaaagaatttcatatgcaaagcatattaaagagaaagcccgctttagtcaatacttttttgtaaatggcaatgcagaatattttgttattggccttttctattcctgtaatgaaagctgtttgtcgtaacttgaaattttatcttttactatgggagtcactatttattattgcttatgtgccctgttcaaaacagaggcacttaatttgatcttttatttttctttgtttttatttttttttttatttagatgaccaaaggtcattacaacctggctttttattgtatttgtttctggtctttgttaagttctattggaaaaaccactgtctgtgtttttttggcagttgtctgcattaacctgttcatacacccattttgtccctttattgaaaaaataaaaaaaattaaagtaca

SEQ ID NO: 145 - DNA, 2722 bp, Homo sapiens
ttggcgcgtaaaagtggccgggactttgcaggcagcggcggccgggggcggagcgggatcgagccctcgccgaggcctgccgccatgggcccgcgccgccgccgccgcctgtcacccgggccgcgcgggccgtgagcgtcatggccttggccggggcccctgcgggcggcccatgcgcgccggcgctggaggccctgctcggggccggcgcgctgcggctgctcgactcctcgcagatcgtcatcatctccgccgcgcaggacgccagcgccccgccggctcccaccggccccgcggcgcccgccgccggcccctgcgaccctgacctgctgctcttcgccacaccgcaggcgccccggcccacacccagtgcgccgcggcccgcgctcggccgcccgccggtgaagcggaggctggacctggaaactgaccatcagtacctggccgagagcagtgggccagctcggggcagaggccgccatccaggaaaaggtgtgaaatccccgggggagaagtcacgctatgagacctcactgaatctgaccaccaagcgcttcctggagctgctgagccactcggctgacggtgtcgtcgacctgaactgggctgccgaggtgctgaaggtgcagaagcggcgcatctatgacatcaccaacgtccttgagggcatccagctcattgccaagaagtccaagaaccacatccagtggctgggcagccacaccacagtgggcgtcggcggacggcttgaggggttgacccaggacctccgacagctgcaggagagcgagcagcagctggaccacctgatgaatatctgtactacgcagctgcgcctgctctccgaggacactgacagccagcgcctggcctacgtgacgtgtcaggaccttcgtagcattgcagaccctgcagagcagatggttatggtgatcaaagcccctcctgagacccagctccaagccgtggactcttcggagaactttcagatctcccttaagagcaaacaaggcccgatcgatgttttcctgtgccctgaggagaccgtaggtgggatcagccctgggaagaccccatcccaggaggtcacttctgaggaggagaacagggccactgactctgccaccatagtgtcaccaccaccatcatctcccccctcatccctcaccacagatcccagccagtctctactcagcctggagcaagaaccgctgttgtcccggatgggcagcctgcgggctcccgtggacgaggaccgcctgtccccgctggtggcggccgactcgctcctggagcatgtgcgggaggacttctccggcctcctccctgaggagttcatcagcctttccccaccccacgaggccctcgactaccacttcggcctcgaggagggcgagggcatcagagacctcttcgactgtgactttggggacctcacccccctggatttctgacagggcttggagggaccagggtttccagagatgctcaccttgtctctgcagccctggagccccctgtccctggccgtcctcccagcctgtttggaaacatttaatttatacccctctcctctgtctccagaagcttctagctctggggtctggctaccgctaggaggctgagcaagccaggaagggaaggagtctgtgtggtgtgtatgtgcatgcagcctacacccacacgtgtgtaccgggggtgaatgtgtgtgagcatgtgtgtgtgcatgtaccggggaatgaaggtgaacatacacctctgtgtgtgcactgcagacacgccccagtgtgtccacatgtgtgtgcatgagtccatgtgtgcgcgtgggggggctctaactgcactttcggcccttttgctctgggggtcccacaaggcccagggcagtgcctgctcccagaatctggtgctctgaccaggccaggtggggaggctttggctggctgggcgtgtaggacggtgagagcacttctgtcttaaaggttttttctgattgaagctttaatggagcgttatttatttatcgaggcctctttggtgagcctggggaatcagcaaaggggaggaggggtgtggggttgataccccaactccctctacccttgagcaagggcaggggtccctgagctgttcttctgccccatactgaaggaactgaggcctgggtgatttatttattgggaaagtgagggagggagacagactgactgacagccatgggtggtcagatggtggggtgggccctctccagggggccagttcagggccccagctgccccccaggatggatatgagatgggagaggtgagtgggggaccttcactgatgtgggcaggaggggtggtgaaggcctcccccagcccagaccctgtggtccctcctgcagtgtctgaagcgcctgcctccccactgctctgccccaccctccaatctgcactttgatttgcttcctaacagctctgttccctcctgctttggttttaataaatattttgatgacgtttgggccgggttttgggactctgttgggaacatttcggggcgggagaggccaaggttgctggggaaatgcccattctccacttcccttctccctgtccgtgcccgatttgatttgagcctcataactcgaagaaaggtcagcttcctcgctgttttggtcctaactcaaaagcagatccagtaaaggtttttgttgtaaaaaaaaaaaaaaaaaaaaaaa

SEQ ID NO: 146 - DNA, 3315 bp, Homo sapiens
aataaatttctctgtgattggttggtgaaggttttcaaaccggagctgtgggcgcggcgctgctctgccgttgggtgaggcgcggagcgaagtgaagggtggcccaggtggggccaggctgactgaatgtatctcctagctatggactaaataatacatggggggaaataaacaagtattcatgagggtgaaaatgtgacccagcaggaaaattacaactattttcaattgacgttgaataggatgagtcatggaatttaagtgatttactgaagattatactactggtagatagaagagctaaagaaagatggatactatgatgctgaatgtgcggaatctgtttgagcagcttgtgcgccgggtggagattctcagtgaaggaaatgaagtccaatttatccagttggcgaaggactttgaggatttccgtaaaaagtggcagaggactgaccatgagctggggaaatacaaggatcttttgatgaaagcagagactgagcgaagtgctctggatgttaagctgaagcatgcacgtaatcaggtggatgtagagatcaaacggagacagagagctgaggctgactgcgaaaagctggaacgacagattcagctgattcgagagatgctcatgtgtgacacatctggcagcattcaactaagcgaggagcaaaaatcagctctggcttttctcaacagaggccaaccatccagcagcaatgctgggaacaaaagactatcaaccattgatgaatctggttccattttatcagatatcagctttgacaagactgatgaatcactggattgggactcttctttggtgaagactttcaaactgaagaagagagaaaagaggcgctctactagccgacagtttgttgatggtccccctggacctgtaaagaaaactcgttccattggctctgcagtagaccaggggaatgaatccatagttgcaaaaactacagtgactgttcccaatgatggcgggcccatcgaagctgtgtccactattgagactgtgccatattggaccaggagccgaaggaaaacaggtactttacaaccttggaacagtgactccaccctgaacagcaggcagctggagccaagaactgagacagacagtgtgggcacgccacagagtaatggagggatgcgcctgcatgactttgtttctaagacggttattaaacctgaatcctgtgttccatgtggaaagcggataaaatttggcaaattatctctgaagtgtcgagactgtcgtgtggtctctcatccagaatgtcgggaccgctgtccccttccctgcattcctaccctgataggaacacctgtcaagattggagagggaatgctggcagactttgtgtcccagacttctccaatgatcccctccattgttgtgcattgtgtaaatgagattgagcaaagaggtctgactgagacaggcctgtataggatctctggctgtgaccgcacagtaaaagagctgaaagagaaattcctcagagtgaaaactgtacccctcctcagcaaagtggatgatatccatgctatctgtagccttctaaaagactttcttcgaaacctcaaagaacctcttctgacctttcgccttaacagagcctttatggaagcagcagaaatcacagatgaagacaacagcatagctgccatgtaccaagctgttggtgaactgccccaggccaacagggacacattagctttcctcatgattcacttgcagagagtggctcagagtccacatactaaaatggatgttgccaatctggctaaagtctttggccctacaatagtggcccatgctgtgcccaatccagacccagtgacaatgttacaggacatcaagcgtcaacccaaggtggttgagcgcctgctttccttgcctctggagtattggagtcagttcatgatggtggagcaagagaacattgaccccctacatgtcattgaaaactcaaatgccttttcaacaccacagacaccagatattaaagtgagtttactgggacctgtgaccactcctgaacatcagcttctcaagactccttcatctagttccctgtcacagagagtccgttccaccctcaccaagaacactcctagatttgggagcaaaagcaagtctgccactaacctaggacgacaaggcaacttttttgcttctccaatgctcaagtgaagtcacatctgcctgttacttcccagcattgactgactataagaaaggacacatctgtactctgctctgcagcctcctgtactcattactacttttagcattctccaggcttttactcaagtttaattgtgcatgagggttttattaaaactatatatatctccccttccttctcctcaagtcacataatatcagcactttgtgctggtcattgttgggagcttttagatgagacatctttccaggggtagaagggttagtatggaattggttgtgattctttttggggaagggggttattgttcctttggcttaaagccaaatgctgctcatagaatgatctttctctagtttcatttagaactgatttccgtgagacaatgacagaaaccctacctatctgataagattagcttgtctcagggtgggaagtgggagggcagggcaaagaaaggattagaccagaggatttaggatgcctccttctaagaaccagaagttctcattccccattatgaactgagctataatatggagctttcataaaaatgggatgcattgaggacagaactagtgatgggagtatgcgtagctttgatttggatgattaggtctttaatagtgttgagtggcacaaccttgtaaatgtgaaagtacaactcgtatttatctctgatgtgctgctggctgaactttgggttcatttggggtcaaagccagtttttcttttaaaattgaattcattctgatgcttggcccccatacccccaaccttgtccagtggagcccaacttctaaaggtcaatatatcatcctttggcatcccaactaacaataaagagtaggctataagggaagattgtcaatattttgtggtaagaaaagctacagtcattttttctttgcactttggatgctgaaatttttcccatggaacatagccacatctagatagatgtgagctttttcttctgttaaaattattcttaatgtctgtaaaaacgattttcttctgtagaatgtttgacttcgtattgacccttatctgtaaaacacctatttgggataatatttggaaaaaaagtaaatagctttttcaaaatgaa

SEQ ID NO: 147 - DNA, 2408 bp, Homo sapiens
cgggtcaggaggtggtgcgcctcgcgcggcagattcgaagctagggcggggcccgcgggctgaggcagcggctgtggcggcgacgctgggcgtgaggtggcggcggccgcgccctggttgggtccccactgctctcgggggcgccatggacgaggccgtgggcgacctgaagcaggcgcttccctgtgtggccgagtcgccaacggtccacgtggaggtgcatcagcgcggcagcagcactgcaaagaaagaagacataaacctgagtgttagaaagctactcaacagacataatattgtgtttggtgattacacatggactgagtttgatgaaccttttttgaccagaaatgtgcagtctgtgtctattattgacacagaattaaaggttaaagactcacagcccatcgatttgagtgcatgcactgttgcacttcacattttccagctgaatgaagatggccccagcagtgaaaatctggaggaagagacagaaaacataattgcagcaaatcactgggttctacctgcagctgaattccatgggctttgggacagcttggtatacgatgtggaagtcaaatcccatctcctcgattatgtgatgacaactttactgttttcagacaagaacgtcaacagcaacctcatcacctggaaccgggtggtgctgctccacggtcctcctggcactggaaaaacatccctgtgtaaagcgttagcccagaaattgacaattagactttcaagcaggtaccgatatggccaattaattgaaataaacagccacagcctcttttctaagtggttttcggaaagtggcaagctggtaaccaagatgtttcagaagattcaggatttgattgatgataaagacgccctggtgttcgtgctgattgatgaggtggagagtctcacagccgcccgaaatgcctgcagggcgggcaccgagccatcagatgccatccgcgtggtcaatgctgtcttgacccaaattgatcagattaaaaggcattccaatgttgtgattctgaccacttctaacatcaccgagaagatcgacgtggccttcgtggacagggctgacatcaagcagtacattgggccaccctctgcagcagccatcttcaaaatctacctctcttgtttggaagaactgatgaagtgtcagatcatataccctcgccagcagctgctgaccctccgagagctagagatgattggcttcattgaaaacaacgtgtcaaaattgagccttcttttgaatgacatttcaaggaagagcgagggcctcagcggccgggtcctgagaaaactcccctttctggctcatgcgctgtatgtccaggcccccaccgtcaccatagaggggttcctccaggccctgtctctggcagtggacaagcagtttgaagagagaaagaagcttgcagcttacatctgatcctgggcttccccatctggtgcttttcccatggagaacacacaaccagtaagtgaggttgccccacacagccgtctcccagggaatcccttctgcaaaccaaacgttacttagactgcaagctagaaagccaccaaggccaggctttgttaaaagaagtgtattctatttatgttgttttaaaatgcatactgagagacaaacatcttgtcattttcactgtttgtaaaagataattcagattgtttgtctccttgtgaagaaccatcgaaacctgtttgttcccagcccacccccagtggatgggatgcataatgccagcaagttttgtttaacagcaaaaaaggaagattaatgcaggtgttatagaagccagaagagaaactgtgtcaccctaaagaagcatataatcatagcattaaaaatgcacacattactccaggtggaaggtggcaattgctttctgatatcagctcgtttgatttagtgcaaaaatgttttcaagactatttaatggatgtaaaaaagcctatttctacattataccaactgagaaaaaaatggtcggtaaagtgttctttcataataaataatcagacatggtcccatttgcaggaaaagtgcagactctgagtgttccagggaaacacatgctggacatcccttgtaacccggtatgggcgcccctgcattgctgggatgtttctgcccacggttttgtttgtgcaataacgttatcacatttctaatgaggattcacattaatataatataaaataaataggtcagttactggtctctttctccgaatgttatgttttgcttttatctcacagtaaaataaatataattaatggtttgcatgtgaaattcacttttgaaagaacatgttaccttaccttttgttttagaagttttcaagtattaaaatattttttagaattttaaaaaaaaaaaaaaaaaa

SEQ ID NO: 148 - DNA, 935 bp, Homo sapiens
agtcagaggtcgcgcaggcgctggtaccccgttggtccgcgcgttgctgcgttgtgaggggtgtcagctcagtgcatcccaggcagctcttagtgtggagcagtgaactgtgtgtggttccttctacttggggatcatgcagagagcttcacgtctgaagagagagctgcacatgttagccacagagccacccccaggcatcacatgttggcaagataaagaccaaatggatgacctgcgagctcaaatattaggtggagccaacacaccttatgagaaaggtgtttttaagctagaagttatcattcctgagaggtacccatttgaacctcctcagatccgatttctcactccaatttatcatccaaacattgattctgctggaaggatttgtctggatgttctcaaattgccaccaaaaggtgcttggagaccatccctcaacatcgcaactgtgttgacctctattcagctgctcatgtcagaacccaaccctgatgacccgctcatggctgacatatcctcagaatttaaatataataagccagccttcctcaagaatgccagacagtggacagagaagcatgcaagacagaaacaaaaggctgatgaggaagagatgcttgataatctaccagaggctggtgactccagagtacacaactcaacacagaaaaggaaggccagtcagctagtaggcatagaaaagaaatttcatcctgatgtttaggggacttgtcctggttcatcttagttaatgtgttctttgccaaggtgatctaagttgcctaccttgaatttttttttaaatatatttgatgacataatttttgtgtagtttatttatcttgtacatatgtattttgaaatcttttaaacctgaaaaataaatagtcatttaatgttgaaaaaaaaaaaaaaaaaaaaaaaaaaaa

SEQ ID NO: 149 - DNA, 2690 bp, Homo sapiens
agcagacaccagcactgctctttctccaagacggccggccatgctctcctcctctgccagtctcctccaccactctctaacctgagagcctgtggaacctgcccgtctcccctcctccatcagacacacctgcctaggaaacaggaaaggacctcggaagtcttctaaggagagtcatggcgtattaccaggagccttcagtggagacctccatcatcaagttcaaagaccaggactttaccaccttgcgggatcactgcctgagcatgggccggacgtttaaggatgagacattccctgcagcagattcttccataggccagaagctgctccaggaaaaacgcctctccaatgtgatatggaagcggccacaggatctaccagggggtcctcctcacttcatcctggatgatataagcagatttgacatccaacaaggaggcgcagctgactgctggttcctggcagcactgggatccttgactcagaacccacagtacaggcagaagatcctgatggtccaaagcttttcacaccagtatgctggcattttccgtttccggttctggcaatgtggccagtgggtggaagtggtgattgatgaccgcctacctgtccagggagataaatgcctctttgtgcgtcctcgccaccaaaaccaagagttctggccctgcctgctggagaaggcctatgccaagctgctcggatcctattccgatctgcactatggcttcctcgaggatgccctggtggacctcacaggaggcgtgatcaccaacatccatctgcactcttcccctgtggacctggtgaaggcagtgaagacagcgaccaaggcaggctccctgataacctgtgccactccaagtgggccaacagatacagcacaggcgatggagaatgggctggtgagtctccatgcctacactgtgactggggctgagcagattcaataccgaaggggctgggaagaaattatctccctgtggaacccctggggctggggcgaggccgaatggagagggcgctggagtgatgggtctcaggagtgggaggaaacctgtgatccgcggaaaagccagctacataagaaacgggaagatggcgagttttggatgtcgtgtcaagatttccaacagaaattcatcgccatgtttatatgtagcgaaattccaattaccctggaccatggaaacacactccacgaaggatggtcccaaataatgtttaggaagcaagtgattctaggaaacactgcaggaggacctcggaatgatgctcaattcaacttctctgtgcaagagccaatggaaggcaccaatgttgtcgtgtgcgtcacagttgctgtcacaccatcaaatttgaaagcagaagatgcaaaatttccactcgatttccaagtgattctggctggctcacagcggttccgggagaaatttccacccgtgtttttttcctcgttcagaaacactgtccaaagctcaaataataaattccgccgcaacttcaccatgacttaccatctgagccctgggaactatgttgtggttgcacagacacggagaaaatcagcggagttcttgctccgaatcttcctgaaaatgccagacagtgacaggcacctgagcagccatttcaacctcagaatgaagggaagcccttcagaacatggctcccaacaaagcattttcaacagatatgctcagcagaggctggacattgatgccacccagcttcagggccttctcaaccaggagcttctaacaggacctccaggggacatgttctccttagatgagtgccgcagcttggtggctctgatggaactgaaagtgaatgggcggctagaccaagaggagtttgcgcgactgtggaagcgccttgttcactaccagcatgttttccagaaggttcagacaagccctggagtcctcctgagctcggacttgtggaaggccatagagaatacagacttcctcagagggatcttcatcagccgtgagctgctgcatctggtgaccctcaggtacagcgacagcgtcggcagggtcagcttccccagcctggtctgcttcctgatgcggcttgaagccatggcaaagaccttccgcaacctctctaaggatggaaaaggactctacctgacagaaatggagtggatgagcctggtcatgtacaactgaagcaaagaggaaagcagacccatggctcaggacaagctcccagtgatcactcaagaatctggctctcattctaagaggctgtgctgcccagtatggtggttgtgataaatctaaaccagccctgcatgaaacagagtccaagctgtctcccaacagcctgggttcggtccttggctggcccaggcccagttaagcctgtggccaccaagcagctcatctgagcactttgggatgtattcagcctacgttgccctggaaaaggaagcaggagatgtctccctgtgggaaaggagaagagaagttgtctctgagtcccctgtcaccagttggattcatttcttggaagagccagaatgagccactttgaccaccctcgggtgctatgggtgacacaagagctgtccactgggtgtttgcagaataattacactatcttatgtctggatcctgatgatttcacagctaaatggcaaaaataaaacatgtttcccataaaaaaaaaaa

SEQ ID NO: 150 - protein, 1703 aa, Homo sapiens
TTGGGCGCCACACCTTGCGCGCCCCGGGGCCCAAGGAGACGACCCTGAAGAGGAGCCTGGCTACTTTTGCCTCAGACGAGTCCGGAGCGCCGGGTTAACCGGTCTGAAGTCCCAGGGGCTTTCTGGGACTGCTCAGCCACCGGCAGCTTCCGGCACCAGGGGACGCCGGACGCCGTCCGGACATTCGGCGCGCTTGCCACGATCTTGGACGGGTCTCGGGCCTCGACCTTTGAATTCCCCGCTCCGGCTCCAAGATGTCAGCAACGCTGATCCTGGAGCCCCCAGGCCGCTGCTGCTGGAACGAGCCGGTGCGCATTGCCGTGCGCGGCCTGGCCCCGGAGCAGCGGGTTACGCTGCGCGCGTCCCTGCGCGACGAGAAGGGCGCGCTCTTCCGGGCCCACGCGCGCTACTGCGCCGACGCCCGCGGCGAGCTGGACCTGGAGCGCGCACCCGCGCTGGGCGGCAGCTTCGCGGGACTCGAGCCCATGGGGCTGCTCTGGGCCCTGGAACCCGAGAAGCCTTTTTGGCGCTTCCTGAAGCGGGACGTACAGATTCCTTTTGTCGTGGAGTTGGAGGTGCTGGACGGCCACGACCCCGAGCCTGGACGGCTGCTGTGCCAGGCGCAGCACGAGCGCCACTTCCTCCCGCCAGGGGTGCGGCGCCAGTCGGTGCGAGCGGGCCGGGTGCGCGCCACGCTCTTCCTGCCGCCAGGACCTGGACCCTTCCCAGGGATCATTGACATCTTTGGTATTGGAGGGGGCCTCTTGGAATATCGAGCCAGCCTCCTTGCTGGCCATGGCTTTGCCACGTTGGCTCTAGCTTATTATAACTTTGAAGATCTCCCCAATAACATGGACAACATATCCCTGGAGTACTTCGAAGAAGCCGTATGCTACATGCTTCAACATCCCCAGGTAAAAGGCCCAGGCATTGGGCTTTTGGGCATTTCTCTAGGAGCTGATATTTGTCTCTCAATGGCCTCATTCTTGAAGAATGTCTCAGCCACAGTTTCCATCAATGGATCTGGGATCAGTGGGAACACAGCCATCAACTATAAGCACAGTAGCATTCCACCATTGGGCTATGACCTGAGGAGAATCAAGGTAGCTTTCTCAGGCCTCGTGGACATTGTGGATATAAGGAATGCTCTCGTAGGAGGGTACAAGAACCCCAGCATGATTCCAATAGAGAAGGCCCAGGGGCCCATCCTGCTCATTGTTGGTCAGGATGACCATAACTGGAGAAGTGAGTTGTATGCCCAAACAGTCTCTGAACGGTTACAGGCCCATGGAAAGGAAAAACCCCAGATCATCTGTTACCCTGGGACTGGGCATTACATCGAGCCTCCTTACTTCCCCCTGTGCCCAGCTTCCCTTCACAGATTACTGAACAAACATGTTATATGGGGTGGGGAGCCCAGGGCTCATTCTAAGGCCCAGGAAGATGCCTGGAAGCAAATTCTAGCCTTCTTCTGCAAACACCTGGGAGGTACCCAGAAAACAGCTGTCCCTAAATTGTAATGCATTTGTCTGTTGTTGACATGAGAGATTCAAGATCAGATTCTAGTGTTCAGTAACCCTATGTGAATCAGATGTCTCCTGGATAACATTAAAGCCATGTCTTTGTCATTAAAAAAAAAAAAAAAAAAAAAAAAAAAAAAAAAAAAAAAAAAAAAAAAAAAAAAAAAAAAAAAAAAAAAAAAA

SEQ ID NO: 151 - DNA, 3044 bp, Homo sapiens
gtttgcgggtggttgttgctctcggggccgtgtggagtaggtctggacctggactcacggctgcttggagcgtccgccatgaggagaagtgaggtgctggcggaggagtccatagtatgtctgcagaaagccctaaatcaccttcgggaaatatgggagctaattgggattccagaggaccagcggttacaaagaactgaggtggtaaagaagcatatcaaggaactcctggatatgatgattgctgaagaggaaagcctgaaggaaagactcatcaaaagcatatccgtctgtcagaaagagctgaacactctgtgcagcgagttacatgttgagccatttcaggaagaaggagagacgaccatcttgcaactagaaaaagatttgcgcacccaagtggaattgatgcgaaaacagaaaaaggagagaaaacaggaactgaagctacttcaagagcaagatcaagaactgtgcgaaattctttgtatgccccactatgatattgacagtgcctcagtgcccagcttagaagagctgaaccagttcaggcaacatgtgacaactttgagggaaacaaaggcttctaggcgtgaggagtttgtcagtataaagagacagatcatactgtgtatggaagaattagaccacaccccagacacaagctttgaaagagatgtggtgtgtgaagacgaagatgccttttgtttgtctttggagaatattgcaacactacaaaagttgctacggcagctggaaatgcagaaatcacaaaatgaagcagtgtgtgaggggctgcgtactcaaatccgagagctctgggacaggttgcaaatacctgaagaagaaagagaagctgtggccaccattatgtctgggtcaaaggccaaggtccggaaagcgctgcaattagaagtggatcggttggaagaactgaaaatgcaaaacatgaagaaagtgattgaggcaattcgagtggagctggttcagtactgggaccagtgcttttatagccaggagcagagacaagcttttgcccctttctgtgctgaggactacacagaaagtctgctccagctccacgatgctgagattgtgcggttaaaaaactactatgaagttcacaaggaactctttgaaggtgtccagaagtgggaagaaacctggaggcttttcttagagtttgagagaaaagcttcagatccaaatcgatttacaaaccgaggaggaaatcttctaaaagaagaaaaacaacgagccaagctccagaaaatgctgcccaagctggaagaagagttgaaggcacgaattgaattgtgggaacaggaacattcaaaggcatttatggtgaatgggcagaaattcatggagtatgtggcagaacaatgggagatgcatcgattggagaaagagagagccaagcaggaaagacaactgaagaacaaaaaacagacagagacagagatgctgtatggcagcgctcctcgaacacctagcaagcggcgaggactggctcccaatacaccgggcaaagcacgtaagctgaacactaccaccatgtccaatgctacggccaatagtagcattcggcctatctttggagggacagtctaccactcccccgtgtctcgacttcctccttctggcagcaagccagtcgctgcttccacctgttcagggaagaaaacaccccgtactggcaggcatggagccaacaaggagaacctggagctcaacggcagcatcctgagtggtgggtaccctggctcggcccccctccagcgcaacttcagcattaattctgttgccagcacctattctgagtttgcgaaggatccgtccctctctgacagttccactgttgggcttcagcgagaactttcaaaggcttccaaatctgatgctacttctggaatcctcaattcaaccaacatccagtcctgagaagccctgatcagtcaaccagctgtggcttcctgtgcctagactggacctaattatatgggggtgactttagtttttcttcagcttaggagtgcttgaaaccttggccaggttccatgaccatgggcctaacttaaagatgtgaatgagtgttacagttgaaagcccatcataggtttagtggtcctaggagacttggttttgacttatatacatgaaaagtttatggcaagaagtgcaaattttagcatatggggcctgacttctctaccacataattctacttgctgaagcatgatcaaagcttgttttatttcaccactgtaggaaaatgattgactatgcccatccctgggggtaattttggcatgtatacctgtaactagtaattaacatcttttttgtttaggcatgttcaattaatgctgtagctatcatagctttgctcttacctgaagccttgtccccaccacacaggacagccttcctcctgaagagaatgtctttgtgtgtccgaagttgagatggcctgccctactggcaaagaggtgacaggaaggctgggagcagctttgttaaattgtgttcagttctgttacacagtgcattgccctttgttgggggtatgcatgtatgaacacacatgcttgtcggaacgctttctcggcgtttgtcccttggctctcatctcccccattcctgtgcctactttgcctgagttcttctacccccgcagttgccagccagattgggagtctgtttgttccaatgggttgagctgtctttgtcgtggagatctggaactttgcacatgtcactactggggaggtgttcctgctctagcttccacgatgaggcgccctctttacctatcctctcaatcactactcttcttgaagcactattatttattcttccgctgtctgcctgcagcagtactactgtcaacatagtgtaaatggttctcaaaagcttaccagtgtggacttggtgttagccacgctgtttacctcatacagtacgtgtcctgtttttaaaatatacaattattcttaaaaataaattaaaatcgtatacttacatttcaaaaaaaaaaaaaaaaa

SEQ ID NO: 152 - DNA, 1914 bp, Homo sapiens
aactcttcatctcgcggctgtctgacttcctcccagcacattcctgcactctgccgtgtccacactgccccacagacccagtcctccaagcctgctgccagctccctgcaagcccctcaggttgggccttgccacggtgccagcaggcagccctgggctgggggtaggggactccctacaggcacgcagccctgagacctcagagggccaccccttgagggtggccaggcccccagtggccaacctgagtgctgcctctgccaccagccctgctggcccctggttccgctggccccccagatgcctggctgagacacgccagtggcctcagctgcccacacctcttcccggcccctgaagttggcactgcagcagacagctccctgggcaccaggcagctaacagacacagccgccagcccaaacagcagcggcatgggcagcgccagcccgggtctgagcagcgtatcccccagccacctcctgctgccccccgacacggtgtcgcggacaggcttggagaaggcggcagcgggggcagtgggtctcgagagacgggactggagtcccagtccacccgccacgcccgagcagggcctgtccgccttctacctctcctactttgacatgctgtaccctgaggacagcagctgggcagccaaggcccctggggccagcagtcgggaggagccacctgaggagcctgagcagtgcccggtcattgacagccaagccccagcgggcagcctggacttggtgcccggcgggctgaccttggaggagcactcgctggagcaggtgcagtccatggtggtgggcgaagtgctcaaggacatcgagacggcctgcaagctgctcaacatcaccgcagatcccatggactggagccccagcaatgtgcagaagtggctcctgtggacagagcaccaataccggctgccccccatgggcaaggccttccaggagctggcgggcaaggagctgtgcgccatgtcggaggagcagttccgccagcgctcgcccctgggtggggatgtgctgcacgcccacctggacatctggaagtcagcggcctggatgaaagagcggacttcacctggggcgattcactactgtgcctcgaccagtgaggagagctggaccgacagcgaggtggactcatcatgctccgggcagcccatccacctgtggcagttcctcaaggagttgctactcaagccccacagctatggccgcttcattaggtggctcaacaaggagaagggcatcttcaaaattgaggactcagcccaggtggcccggctgtggggcatccgcaagaaccgtcccgccatgaactacgacaagctgagccgctccatccgccagtattacaagaagggcatcatccggaagccagacatctcccagcgcctcgtctaccagttcgtgcaccccatctgagtgcctggcccagggcctgaaacccgccctcaggggcctctctcctgcctgccctgcctcagccaggccctgagatgggggaaaacgggcagtctgctctgctgctctgaccttccagagcccaaggtcagggaggggcaaccaactgccccagggggatatgggtcctctggggccttcgggaccctggggcaggggtgcttcctcctcaggcccagctgctcccctggaggacagagggagacagggctgctccccaacacctgcctctgaccccagcatttccagagcagagcctacagaagggcagtgactcgacaaaggccacaggcagtccaggcctctctctgctccatccccctgcctcccattctgcaccacacctggcatggtgcagggagacatctgcacccctgagttgggcagccaggagtgcccccgggaatggataataaagatactagagaactga

SEQ ID NO: 153 - DNA, 2349 bp, Homo sapiens
acttcctcatagaccttggatgtgggaggattgcattcagtctagttcctggttgccggctgaaataacctgaccgagagcatcaccccctgaacatggacttgcagaattccacagaagagaggagactggcctagacagacagccccaggagctgagggcccaacaggctttctaccctggatgctgctcccatgccctgacatgaggcccactacaatgctctccaaaatgtccacaaaagtgacttaagtcaggttcccccaaaccagacaccaagacaagaatccatgtgtgtgtgactgaaggaagtgctgggagagccccagctgcagcctggatgtgaactgcaactccaaagtgtgtccagactcaaggcaagggcactaggctttccagacctcctactaagtcattgatccagcactgccctgccaggacataaatccctggcacctcttgctctctgcaaaggagggcaaagcagcttcaggagcccttgggagtcctccaaagagagtctagggtacaggtccgaaagtagaagaacacagaaggcaggccaggggcactgtgagatggtaaaagagatctgaagggatccagaattcaagccaggaagaagcagcaatctgtcttctggattaaaactgaagatcaacctactttcaacttactaagaaaggggatcatggacattgaagcatatcttgaaagaattggctataagaagtctaggaacaaattggacttggaaacattaactgacattcttcaacaccagatccgagctgttccctttgagaaccttaacatccattgtggggatgccatggacttaggcttagaggccatttttgatcaagttgtgagaagaaatcggggtggatggtgtctccaggtcaatcatcttctgtactgggctctgaccactattggttttgagaccacgatgttgggagggtatgtttacagcactccagccaaaaaatacagcactggcatgattcaccttctcctgcaggtgaccattgatggcaggaactacattgtcgatgctgggtttggacgctcataccagatgtggcagcctctggagttaatttctgggaaggatcagcctcaggtgccttgtgtcttccgtttgacggaagagaatggattctggtatctagaccaaatcagaagggaacagtacattccaaatgaagaatttcttcattctgatctcctagaagacagcaaataccgaaaaatctactcctttactcttaagcctcgaacaattgaagattttgagtctatgaatacatacctgcagacatctccatcatctgtgtttactagtaaatcattttgttccttgcagaccccagatggggttcactgtttggtgggcttcaccctcacccataggagattcaattataaggacaatacagatctaatagagttcaagactctgagtgaggaagaaatagaaaaagtgctgaaaaatatatttaatatttccttgcagagaaagcttgtgcccaaacatggtgatagattttttactatttagaataaggagtaaaacaatcttgtctatttgtcatccagctcaccagttatcaactgacgacctatcatgtatcttctgtacccttaccttattttgaagaaaatcctagacatcaaatcatttcacctataaaaatgtcatcatatataattaaacagctttttaaagaaacataaccacaaaccttttcaaataataataataataataataaaaaatgtattttaaagatggcctgtggttatcttggaaattggtgatttatgctagaaagcttttaatgttggtttattgttgaattcctagaaaagttttattggtagatgagtaaataaaatattgtaaaaaaacttattgtctataaagtatattaaaacattgttggctaatataatttgaaaaaaagtggttttttggaagacttaggatattatggtgctacataatttttcctcgatgctctcttcctctcatctttcttgtctcttaaattgctttacttccttgcacactttgccatacaagaatgaacatgagcttttcttgtgtagatctgagttgaaatcctgtggacactgggcgaattactttttagatctgtagctctgactcctcaggcataaaatgggaataatgcttttacagtttagtggcggaactaaactcccaaaattatttgttatatggatcaagtaataacgtcagtaatgtttttggtacaaagtcattatttaataaaagttattgttccatcttgcttgcccccccaaaaaaaaaaaaaaaaa

SEQ ID NO: 154 - DNA, 7054 bp, Homo sapiens
agagaggaggcggttgtcaaggcgacgtgggtaggaggagaggacagagggaggaggaaggatgggcggtgttggcgtagccgcagggaggtgactgaagcgagcctggcctcttgcatcctccgcctgtgtacctccctcccctttttttccgccttctgccagcagaagcagcagccgcagcacctgagccgctactgccgctcactcaggacaacgctatggctgagcctgggcacagccaccatctctccgccagagtcaggggaagaactgagaggcgcataccccggctgtggcggctgctgctctgggctgggaccgccttccaggtgacccagggaacgggaccggagcttcatgcctgcaaagagtctgagtaccactatgagtacacggcgtgtgacagcacgggttccaggtggagggtcgccgtgccgcataccccgggcctgtgcaccagcctgcctgaccccgtcaagggcaccgagtgctccttctcctgcaacgccggggagtttctggatatgaaggaccagtcatgtaagccatgcgctgagggccgctactccctcggcacaggcattcggtttgatgagtgggatgagctgccccatggctttgccagcctctcagccaacatggagctggatgacagtgctgctgagtccaccgggaactgtacttcgtccaagtgggttccccggggcgactacatcgcctccaacacggacgaatgcacagccacactgatgtacgccgtcaacctgaagcaatctggcaccgttaacttcgaatactactatccagactccagcatcatctttgagtttttcgttcagaatgaccagtgccagcccaatgcagatgactccaggtggatgaagaccacagagaaaggatgggaattccacagtgtggagctaaatcgaggcaataatgtcctctattggagaaccacagccttctcagtatggaccaaagtacccaagcctgtgctggtgagaaacattgccataacaggggtggcctacacttcagaatgcttcccctgcaaacctggcacgtatgcagacaagcagggctcctctttctgcaaactttgcccagccaactcttattcaaataaaggagaaacttcttgccaccagtgtgaccctgacaaatactcagagaaaggatcttcttcctgtaacgtgcgcccagcttgcacagacaaagattatttctacacacacacggcctgcgatgccaacggagagacacaactcatgtacaaatgggccaagccgaaaatctgtagcgaggaccttgagggggcagtgaagctgcctgcctctggtgtgaagacccactgcccaccctgcaacccaggcttcttcaaaaccaacaacagcacctgccagccctgcccatatggttcctactccaatggctcagactgtacccgctgccctgcagggactgaacctgctgtgggatttgaatacaaatggtggaacacgctgcccacaaacatggaaacgaccgttctcagtgggatcaacttcgagtacaagggcatgacaggctgggaggtggctggtgatcacatttacacagctgctggagcctcagacaatgacttcatgattctcactctggttgtgccaggatttagacctccgcagtcggtgatggcagacacagagaataaagaggtggccagaatcacatttgtctttgagaccctctgttctgtgaactgtgagctctacttcatggtgggtgtgaattctaggaccaacactcctgtggagacgtggaaaggttccaaaggcaaacagtcctatacctacatcattgaggagaacactaccacgagcttcacctgggccttccagaggaccacttttcatgaggcaagcaggaagtacaccaatgacgttgccaagatctactccatcaatgtcaccaatgttatgaatggtgtggcctcctactgccgtccctgtgccctagaagcctctgatgtgggctcctcctgcacctcttgtcctgctggttactatattgaccgagattcaggaacctgccactcctgccccactaacacaattctgaaagcccaccagccttatggtgtccaggcctgtgtgccctgtggtccagggaccaagaacaacaagatccactctctgtgctacaacgattgcaccttctcacgcaacactccgaccaggactttcaactacaacttctccgctttggcaaacactgtcactcttgctggagggccaagcttcacttccaaagggctgaaatacttccatcactttaccctcagtctctgtggaaaccagggtaggaaaatgtctgtgtgcaccgacaatgtcactgacctccggattcctgagggtgagtcagggttctccaaatctatcacagcctacgtctgccaggcagtcatcatccccccagaggtgacaggctacaaggccggggtttcctcacagcctgtcagccttgctgatcgacttattggggtgacaacagatatgactctggatggaatcacctccccagctgaacttttccacctggagtccttgggaataccggacgtgatcttcttttataggtccaatgatgtgacccagtcctgcagttctgggagatcaaccaccatccgcgtcaggtgcagtccacagaaaactgtccctggaagtttgctgctgccaggaacgtgctcggatgggacctgtgatggctgcaacttccacttcctgtgggagagcgcggctgcttgcccgctctgctcagtggctgactaccatgctatcgtcagcagctgtgtggctgggatccagaagactacttacgtgtggcgagaacccaagctatgctctggtggcatttctctgcctgagcagagagtcaccatctgcaaaaccatagatttctggctgaaagtgggcatctctgcaggcacctgtactgccatcctgctcaccgtcttgacctgctacttttggaaaaagaatcaaaaactagagtacaagtactccaagctggtgatgaatgctactctcaaggactgtgacctgccagcagctgacagctgcgccatcatggaaggcgaggatgtagaggacgacctcatctttaccagcaagaagtcactctttgggaagatcaaatcatttacctccaagaggactcctgatggatttgactcagtgccgctgaagacatcctcaggaggcctagacatggacctgtgagaggcactgcctgcctcacctgcctcctcaccttgcatagcacctttgcaagcctgcggcgatttgggtgccagcatcctgcaacacccactgctggaaatctcttcattgtggccttatcagatgtttgaatttcagatctttttttatagagtacccaaaccctcctttctgcttgcctcaaacctgccaaatatacccacactttgtttgtaaattatgcccttgcttgtatcttgtttcccaaaatggcccatccgccagagccatagcttcgtctgctcataattcttatagctttggaatgaaaatatttctatcttcttaagtatagaaactatttcctctgtcctctaacttaagggcagaaacagctgggagttttcctcgcatgccctcagctcatgatctcttcaggagagaggctgggtgaggagggtgtcggggttccctggtggataatcttcatagcagcctggatccatttcccctggataaccagctcaaagggagtgaaaatggtagtctgagggcaaggggagcaaggcctgggtaagaaaagccttgaaaagcataaaaagaggccgggcgcggtggctcacgcctgtaatcccagcactttgggaggccgaggcgggcagatcatgaggtcgggagattgagaccatcctggctaacacggtgaaaccccgtctctactaaaaatacaaaaaattagccgggcgtggtggcgggtgcctgtagtcccagctactcgggaggctgaggcgggagaatagcgtgaacctggaaggcggagcttgcagtgagccgagatcgcgccactgcactccatccagcctgggtgacagagtgagactctgcctcaaaaaaaaaaaaaaaaaaaaagaaaagcacaaagagaggcaacaaggaatgtttttgtttttgagacaggctctcactctgtcacctaggctggagtgcagtggcataatcactgttcagtgcagcctcaagctcttgggctcaagctatcctcccatctcaacctctcaagtagctaggactacaagtgtgcaccaccaggctcactaatttttatattttttgtagacacagggtttcaccatgttgcccaggctggtctccaactcctgggctcaagtgatctgtccgcctcagcctcccaaactgctgggattacaggcataagccactgcactcagccttttatttgttttttaaaccacgtagctcattgccttctcttaagtaaatgatagatattctcactgaagccaaaggaataagttcatcaagaaaatgcccaaagccctggtggatacatcctccctatcttttttttaaaccttccactatcactctatgacactgaaaagaaccaggtaagccccaaacccagatgttccagccttatcctctgttgggtttacccacagacatagcaaaccctgtcagtgaggaaaattccccatccttgagtgcccccgtcctagaagtttgggccatattatggaacaggggtctcttatttgaaaagagcacaaggaggccaagattttaatggggcactttaggggatacagcccacaatggcatgggcctgaggtggccgtgatgtctgcttctaagcttaacgcatctgctcaggcacagaataaacgtctaggctggccaaaaaaggaactgaatcccaggcccatacgccagcaccagaatcaaaccagtcttcaaggaaggaaggctaggagagtttaacaagattttcactgggcccagcatggtggctcacacctgtaatcccaaggcagaatggtggcttgagctcaggagttcaagaccagcctgggcaacacagtgagaccctgtctctaaaaaatttaaaaataaacaaggtgttcaccaagctgggatacttctcactattaagcccctatctttctctttttttcattctcaattgctttgtgtgataaaaaactaaagagacttctggtccaatttctggcaacatcccttctgaaaggtgagtagagtgggtgtcttctatgcccattttccccaattttacacaaactattatcaatgaacttttaagtacctagaatgggtaaaaccagagcaagactttaaattaccttcttctttcttctactggcagttctgcctccatcactatcaggctagggtgaccttcccttggtcaagccccaattgcccatgatttgtgcctgtgccctttctccagtgaccatttggtgaccagatggtagatatagaaaggggatggcatttgcaagtgactagtctgccacaaaatgctcatctgattagccactgctgccctggcaatggctttgtaagagtcaatgagaactagagccaggctgtggtccctggccatcaacagtgttggtgacggcagggagtccctttggtttaataaatccagtttttctttgggtatccaaattctcccctccttttgtaggagtcaggctctcagaacctgtgtccatgttggaacttcccccagtgtggatgcagatacgcagctcctgagctccagcctaaagtcttctgtagcctcagcaatacttgggcacctgctgtctcactgaatagctttcttttgtgacaaaggccacagacagcccttagactattccggaaacagtaggaaaaattacatatgtctttgacttctttattctgactccactgattttagccataatactttaaggagctactttttactaccccttaccgtgctgacttctgcaggtctgccctgtgacctgtcaggaactcctgagttacgctactggggtcacctgttgctcccctagcaagttaggcatgtcatatatttttaacagctttattgagatataattcacatattacacaattcacctttaaaacatacgattcaatggttttcagcaaactcacagagttgtccgcccacttgagagcaaacacatgttcaattttcttttcctttttttttttgagacagagtcagctttgttgcccaggctggagtgcagtgccatgatcttggctcactgcagcctccccatcctgggttcaagtgatccttctgcttcagcctccccagtagctgggattacaagcatgcgccaccacgcctagctaatttttgtgtttttagtagagatggggtttcaccatgttggccaggctggtctcaaactcctggactcaagtgatccacccacctcggcctcccaaagtgctgggattacaggtgtaagccaccgtgcctggcctacatgttcaattttctatgaacaaaggctttagtccttgacccagggctaaagtggtctgtccaagctgttgttggtagagggagtatgataaaatgtttaaatctcatttggttaccttgagtcctggaacatgcagtaactgtcatgctatagacatcatctgtatttggctgggaatacaaatgaagattgtggtgtattcaagcagtagggtttttgcttttgtttttgttttagtgccaacaaaacttttttttgtctgactacattaaagataagactgactatatttatacaacagaaactttgtaatagattttttcagctttgtgaaatcgaattttttttcatcagggctggttggatttcctttttaccctgtaatccaagcgttaatagtttgttagaagatgggttattgcatgtcactttttttttttgtaaaataaaaacataccttacaaaaaaaaaaaaaaaaaaaaaaaa

SEQ ID NO: 155 - DNA, 1912 bp, Homo sapiens
aggggctgggcggggctcgggctcctgctccggctcagctgcggcggccgcaggttccaaagcgggtccgagccgccgccgcgcgcgcgccgcgcactgcagccccaggccccggccccccacccacgtctgcgttgctgccccgcctgggccaggccccaaaggcaaggacaaagcagctgtcagggaacctccgccggagtcgaatttacgtgcagctgccggcaaccacaggttccaagatggtttgcgggggcttcgcgtgttccaagaactgcctgtgcgccctcaacctgctttacaccttggttagtctgctgctaattggaattgctgcgtggggcattggcttcgggctgatttccagtctccgagtggtcggcgtggtcattgcagtgggcatcttcttgttcctgattgctttagtgggtctgattggagctgtaaaacatcatcaggtgttgctatttttttatatgattattctgttacttgtatttattgttcagttttctgtatcttgcgcttgtttagccctgaaccaggagcaacagggtcagcttctggaggttggttggaacaatacggcaagtgctcgaaatgacatccagagaaatctaaactgctgtgggttccgaagtgttaacccaaatgacacctgtctggctagctgtgttaaaagtgaccactcgtgctcgccatgtgctccaatcataggagaatatgctggagaggttttgagatttgttggtggcattggcctgttcttcagttttacagagatcctgggtgtttggctgacctacagatacaggaaccagaaagacccccgcgcgaatcctagtgcattcctttgatgagaaaacaaggaagatttcctttcgtattatgatcttgttcactttctgtaattttctgttaagctccatttgccagtttaaggaaggaaacactatctggaaaagtaccttattgatagtggaattatatatttttactctatgtttctctacatgtttttttctttccgttgctgaaaaatatttgaaacttgtggtctctgaagctcggtggcacctggaatttactgtattcattgtcgggcactgtccactgtggcctttcttagcatttttacctgcagaaaaactttgtatggtaccactgtgttggttatatggtgaatctgaacgtacatctcactggtataattatatgtagcactgtgctgtgtagatagttcctactggaaaaagagtggaaatttattaaaatcagaaagtatgagatcctgttatgttaagggaaatccaaattcccaattttttttggtctttttaggaaagattgttgtggtaaaaagtgttagtataaaaatgataatttacttgtagtcttttatgattacaccaatgtattctagaaatagttatgtcttaggaaattgtggtttaatttttgacttttacaggtaagtgcaaaggagaagtggtttcatgaaatgttctaatgtataataacatttaccttcagcctccatcagaatggaacgagttttgagtaatcaggaagtatatctatatgatcttgatattgttttataataatttgaagtctaaaagactgcatttttaaacaagttagtattaatgcgttggcccacgtagcaaaaagatatttgattatcttaaaaattgttaaataccgttttcatgaaatttctcagtattgtaacagcaacttgtcaaacctaagcatatttgaatatgatctcccataatttgaaattgaaatcgtattgtgtggctctgtatattctgttaaaaaattaaaggacagaaacctttctttgtgtatgcatgtttgaattaaaagaaagtaatggaagaattgatcgatgaaaaaaaaaaaa

SEQ ID NO: 156 - DNA, 1453 bp, Homo sapiens
cgcaaaggacctgacgacgtgctgcgtcgttacttttgaaacgcttggcggggaagtgctgttggagccgctgtggttgctgtccgcggagtggaagcgcgtgcttttgtttgtgtccctggccatggcgctgcagctctcccgggagcagggaatcaccctgcgcgggagcgccgaaatcgtggccgagttcttctcattcggcatcaacagcattttatatcagcgtggcatatatccatctgaaacctttactcgagtgcagaaatacggactcaccttgcttgtaactactgatcttgagctcataaaatacctaaataatgtggtggaacaactgaaagattggttatacaagtgttcagttcagaaactggttgtagttatctcaaatattgaaagtggtgaggtcctggaaagatggcagtttgatattgagtgtgacaagactgcaaaagatgacagtgcacccagagaaaagtctcagaaagctatccaggatgaaatccgttcagtgatcagacagatcacagctacggtgacatttctgccactgttggaagtttcttgttcatttgatctgctgatttatacagacaaagatttggttgtacctgaaaaatgggaagagtcgggaccacagtttattaccaattctgaggaagtccgccttcgttcatttactactacaatccacaaagtaaatagcatggtggcctacaaaattcctgtcaatgactgaggatgacatgaggaaaataatgtaattgtaattttgaaatgtggttttcctgaaatcaagtcatctatagttgatatgttttatttcattggttaatttttacatggagaaaaccaaaatgatacttactgaactgtgtgtaattgttccttttatttttttggtacctatttgacttaccatggagttaacatcatgaatttattgcacattgttcaaaaggaaccaggaggtttttttgtcaacattgtgatgtatattcctttgaagatagtaactgtagatggaaaaacttgtgctataaagctagatgctttcctaaatcagatgttttggtcaagtagtttgactcagtataggtagggagatatttaagtataaaatacaacaaaggaagtctaaatattcagaatctttgttaaggtcctgaaagtaactcataatctataaacaatgaaatattgctgtatagctccttttgaccttcatttcatgtatagttttccctattgaatcagtttccaattatttgactttaatttatgtaacttgaacctatgaagcaatggatatttgtactgtttaatgttctgtgatacagaactcttaaaaatgttttttcatgtgttttataaaatcaagttttaagtgaaagtgaggaaataaagttaagtttgttttaaatttgtcttaaaaaaaaaaaaaaaaaaa

SEQ ID NO: 157 - DNA, 2161 bp, Homo sapiens
gcgacggttaaacggggcccaaggcaggggtggcgggtcagtgctgctcgggggcttctccatccaggtccctggagttcctggtccctggagctccgcacttggcggcgcaacctgcgtgaggcagcgcgactctggcgactggccggccatgccttcccgggctgaggactatgaagtgttgtacaccattggcacaggctcctacggccgctgccagaagatccggaggaagagtgatggcaagatattagtttggaaagaacttgactatggctccatgacagaagctgagaaacagatgcttgtttctgaagtgaatttgcttcgtgaactgaaacatccaaacatcgttcgttactatgatcggattattgaccggaccaatacaacactgtacattgtaatggaatattgtgaaggaggggatctggctagtgtaattacaaagggaaccaaggaaaggcaatacttagatgaagagtttgttcttcgagtgatgactcagttgactctggccctgaaggaatgccacagacgaagtgatggtggtcataccgtattgcatcgggatctgaaaccagccaatgttttcctggatggcaagcaaaacgtcaagcttggagactttgggctagctagaatattaaaccatgacacgagttttgcaaaaacatttgttggcacaccttattacatgtctcctgaacaaatgaatcgcatgtcctacaatgagaaatcagatatctggtcattgggctgcttgctgtatgagttatgtgcattaatgcctccatttacagcttttagccagaaagaactcgctgggaaaatcagagaaggcaaattcaggcgaattccataccgttactctgatgaattgaatgaaattattacgaggatgttaaacttaaaggattaccatcgaccttctgttgaagaaattcttgagaaccctttaatagcagatttggttgcagacgagcaaagaagaaatcttgagagaagagggcgacaattaggagagccagaaaaatcgcaggattccagccctgtattgagtgagctgaaactgaaggaaattcagttacaggagcgagagcgagctctcaaagcaagagaagaaagattggagcagaaagaacaggagctttgtgttcgtgagagactagcagaggacaaactggctagagcagaaaatctgttgaagaactacagcttgctaaaggaacggaagttcctgtctctggcaagtaatccagaacttcttaatcttccatcctcagtaattaagaagaaagttcatttcagtggggaaagtaaagagaacatcatgaggagtgagaattctgagagtcagctcacatctaagtccaagtgcaaggacctgaagaaaaggcttcacgctgcccagctgcgggctcaagccctgtcagatattgagaaaaattaccaactgaaaagcagacagatcctgggcatgcgctagccaggtagagagacacagagctgtgtacaggatgtaatattaccaacctttaaagactgatattcaaatgctgtagtgttgaatacttggttccatgagccatgcctttctgtatagtacacatgatatttcggaattggttttactgttcttcagcaactattgtacaaaatgttcacatttaatttttctttcttcttttaagaacatattataaaaagaatactttcttggttgggcttttaatcctgtgtgtgattactagtaggaacatgagatgtgacattctaaatcttgggagaaaaaataatgttaggaaaaaaatatttatgcaggaagagtagcactcactgaatagttttaaatgactgagtggtatgcttacaattgtcatgtctagatttaaattttaagtctgagattttaaatgtttttgagcttagaaaacccagttagatgcaatttggtcattaataccatgacatcttgcttataaatattccattgctctgtagttcaaatctgttagctttgtgaaaattcatcactgtgatgtttgtattctttttttttttctgtttaacagaatatgagctgtctgtcatttacctacttctttcccactaaataaaagaattcttcagtttccctgtaaaaaaaaaaaaaaaaaaa

SEQ ID NO: 158 - DNA, 1548 bp, Homo sapiens
gcgcaggcgcagtctccgcgtgcgcgcctcgccggcgcctccatcccggatccttgctgcagcgtcagcgccgccgcccgtgcctttcctcttcctcctcctcctccttggcatccgcctcttcttcctcctgcgtcctcccccgctgcctccgctgctcccgacgcggagcccggagcccgcgccgagcccctggcctcgcggtgccatgctgccccggcggcggcgctgaaggatggcgacgccgctgcctccgccctccccgcggcacctgcggctgctgcggctgctgctctccggcctcgtcctcggcgccgccctgcgtggagccgccgccggccacccggatgtagccgcctgtcccgggagcctggactgtgccctgaagaggcgggcaaggtgtcctcctggtgcacatgcctgtgggccctgccttcagcccttccaggaggaccagcaagggctctgtgtgcccaggatgcgccggcctccaggcgggggccggccccagcccagactggaagatgagattgacttcctggcccaggagcttgcccggaaggagtctggacactcaactccgcccctacccaaggaccgacagcggctcccggagcctgccaccctgggcttctcggcacgggggcaggggctggagctgggcctcccctccactccaggaacccccacgcccacgccccacacctccctgggctcccctgtgtcatccgacccggtgcacatgtcgcccctggagccccggggagggcaaggcgacggcctcgcccttgtgctgatcctggcgttctgtgtggccggtgcagccgccctctccgtagcctccctctgctggtgcaggctgcagcgtgagatccgcctgactcagaaggccgactacgccactgcgaaggcccctggctcacctgcagctccccggatctcgcctggggaccagcggctggcacagagcgcggagatgtaccactaccagcaccaacggcaacagatgctgtgcctggagcggcataaagagccacccaaggagctggacacggcctcctcggatgaggagaatgaggacggagacttcacggtgtacgagtgcccgggcctggccccgaccggggaaatggaggtgcgcaaccctctgttcgaccacgccgcactgtccgcgcccctgccggcccccagctcaccgcctgcactgccatgacctggaggcagacagacgcccacctgctccccgacctcgaggcccccggggaggggcagggcctggagcttcccactaaaaacatgttttgatgctgtgtgcttttggctgggcctcgggctccaggccctgggaccccttgccagggagacccccgaacctttgtgccaggacacctcctggtcccctgcacctctcctgttcggtttagacccccaaactggagggggcatggagaaccgtagagcgcaggaacgggtgggtaattctagagacaaaagccaattaaagtccatttcagacctgcggcttctgaaaaaaaaaaaaaaaaaaaa

SEQ ID NO: 159 - DNA, 3039 bp, Homo sapiens
aggcgcagaggagggcggtgttgagaccggcggagcggcgggacccctaggtggcggagggacgctccgggaaagcgaggggcgctacgagctctggcccacgtgacctgccgggggcgggagcagggggcgcgccggcctcctgcggtgcccctgccttggggaggggccgtgaccacccgtctgtcgcccgaggcggccgccgctgcaccttcaccgcgtacccgggacccgcccgcccgcgggagaaatgttgctgaagtgctgctgaaagggccagagatgcaaggatttgggatacattttgaacctttaagctgtctgacattgacctcctttcattattaataaagaagaatcaggagcttaggatgtattaacaccaactcattaatatactaaccggacaatgttctacaaacaattctacattgtaaaggactggattggcacaaaataaaataattttattttattcagcttataatatgactcgatggaggaaaatttgataagcatgagagaagaccattcttttcatgttcgttacagaatggaagcttcttgcctagagctggccttggaaggggaacgtctatgtaaatcaggagactgccgcgctggcgtgtcattctttgaagctgcagttcaagttggaactgaagacctaaaaacacttagcgctatttacagccagttgggcaatgcttatttctatttgcatgattatgccaaagcattagaatatcaccatcatgatttaacccttgcaaggactattggagaccagctgggggaagcgaaagctagtggtaatctgggaaacaccttaaaagttcttgggaattttgacgaagccatagtttgttgtcagcgacacctagatatttccagagagcttaatgacaaggtgggagaagcaagagcactttacaatcttgggaatgtgtatcatgccaaagggaaaagttttggttgccctggtccccaggatgtaggagaatttccagaagaagtgagagatgctctgcaggcagccgtggatttttatgaggaaaacctatcattagtgactgctttgggtgaccgagcggcacaaggacgtgcctttggaaatcttggaaacacacattacctccttggcaacttcagggatgcagttatagctcatgagcagcgtctccttattgcaaaagaatttggagataaagcagctgaaagaagagcatatagcaaccttggaaatgcatatatatttcttggtgaatttgaaactgcctcggaatactacaagaagacactactgttggcccgacagcttaaagaccgagctgtagaagcacagtcttgttacagtcttggaaatacatatactttacttcaagactatgaaaaggccattgattatcatctgaagcacttagcaattgctcaagagctgaatgatagaattggtgaaggaagagcatgttggagcttaggaaatgcatacacagcactaggaaatcatgatcaagcaatgcattttgctgaaaagcacttggaaatttcaagagaggttggggataaaagtggtgaactaacagcacgacttaatctctcagaccttcaaatggttcttggtctgagctacagcacaaataactccataatgtctgaaaatactgaaattgatagcagtttgaatggtgtacgccccaagttgggacgccggcatagtatggaaaatatggaacttatgaagttaacaccagaaaaggtacagaactggaacagtgaaattcttgctaagcaaaaacctcttattgccaaaccttctgcaaagctactctttgtcaacagactgaaggggaaaaaatacaaaacgaattcctccactaaagttctccaagatgccagtaattctattgaccaccgaattccaaattctcagaggaaaatcagtgcagatactattggagatgaagggttctttgacttattaagccgatttcaaagcaataggatggatgatcagagatgttgcttacaagaaaagaactgccatacagcttcaacaacaacttcttccactccccctaaaatgatgctaaaaacatcatctgttcctgtggtatcccccaacacggatgagtttttagatcttcttgccagctcacagagtcgccgtctggatgaccagagggctagtttcagtaatttgccagggcttcgtctaacacaaaacagccagtcggtacttagccacctgatgactaatgacaacaaagaggctgatgaagatttctttgacatccttgtaaaatgtcaaggatccagattagatgatcaaagatgtgctccaccacctgctaccacaaagggtccgacagtaccagatgaagactttttcagccttattttacggtcccagggaaagagaatggatgaacagagagttcttttacaaagagatcaaaacagagacactgactttgggctaaaggactttttgcaaaataatgctttgttggagtttaaaaattcagggaaaaaatcggcagaccattagttactatggatttattttttttcctttcaaacacggtaaggaaacaatctattacttttttccttaaaaggagaatttatagcactgtaatacagcttaaaatatttttagaatgatgtaaatagttaaccttcagtagtctattaaggcattaatacttctctggacatgcgcgtttgagggtggaggggtcctgtaaggtgcttcatcgtctgtgattactgcttgggatgtgttctttggcagcttgtgagattactttacctagtgtttataaagtaggaagttaagtgaatcatagattagaatttaatactcttatggaaataattttttaacatcttaattgacaatggcgtttttttatacataaccatggatgtagtgggaaacaatgttgtttggtaaaaataatgtacttgatcaatgtaaaaaagtatataaaatagtcttactaaaaatctaggtttttttttcctccaaaaaaa

SEQ ID NO: 160 - DNA, 4968 bp, Homo sapiens
gttggaaacggcactgctgagtgaggttgaggggtgtctcggtatgtgcgccttggatctggtgtaggcgaggtcacgcctctcttcagacagcccgagccttcccggcctggcgcgtttagttcggaactgcgggacgcgccggtgggctagggcaaggtgtgtgccctcttcctgattctggagaaaaatgccggtccggaagcaagatacccagagagcattgcaccttttggaggaatatcgttcaaaactaagccaaactgaagacagacagctcagaagttccatagaacgggttattaacatatttcagagcaacctctttcaggctttaatagatattcaagaattttatgaagtgaccttactggataatccaaaatgtatagatcgttcaaagccgtctgaaccaattcaacctgtgaatacttgggagatttccagccttccaagctctactgtgacttcagagacactgccaagcagccttagccctagtgtagagaaatacaggtatcaggatgaagatacacctcctcaagagcatatttccccacaaatcacaaatgaagtgataggtccagaattggttcatgtctcagagaagaacttatcagagattgagaatgtccatggatttgtttctcattctcatatttcaccaataaagccaacagaagctgttcttccctctcctcccactgtccctgtgatccctgtcctgccagtccctgctgagaatactgtcatcctacccaccataccacaggcaaatcctcccccagtactggtcaacacagatagcttggaaacaccaacttacgttaatggcacagatgcagattatgaatatgaagaaatcacacttgaaaggggaaattcagggcttggtttcagcattgcaggaggtacggacaacccacacattggagatgactcaagtattttcattaccaaaattatcacagggggagcagccgcccaagatggaagattgcgggtcaatgactgtatattacgagtaaatgaagtagatgttcgtgatgtaacacatagcaaagcagttgaagcgttgaaagaagcagggtctattgtacgcttgtatgtaaaaagaaggaaaccagtgtcagaaaaaataatggaaataaagctcattaaaggtcctaaaggtcttgggtttagcattgctggaggtgttggaaatcagcatattcctggggataatagcatctatgtaaccaaaataattgaaggaggtgcagcacataaggatggcaaacttcagattggagataaacttttagcagtgaataacgtatgtttagaagaagttactcatgaagaagcagtaactgccttaaagaacacatctgattttgtttatttgaaagtggcaaaacccacaagtatgtatatgaatgatggctatgcaccacctgatatcaccaactcttcttctcagcctgttgataaccatgttagcccatcttccttcttgggccagacaccagcatctccagccagatactccccagtttctaaagcagtacttggagatgatgaaattacaagggaacctagaaaagttgttcttcatcgtggctcaacgggccttggtttcaacattgtaggaggagaagatggagaaggaatatttatttcctttatcttagccggaggacctgctgatctaagtggagagctcagaaaaggagatcgtattatatcggtaaacagtgttgacctcagagctgctagtcatgagcaggcagcagctgcattgaaaaatgctggccaggctgtcacaattgttgcacaatatcgacctgaagaatacagtcgttttgaagctaaaatacatgatttacgggagcagatgatgaatagtagtattagttcagggtcaggttctcttcgaactagccagaagcgatccctctatgtcagagccctttttgattatgacaagactaaagacagtgggcttcccagtcagggactgaacttcaaatttggagatatcctccatgttattaatgcttctgatgatgaatggtggcaagccaggcaggttacaccagatggtgagagcgatgaggtcggagtgattcccagtaaacgcagagttgagaagaaagaacgagcccgattaaaaacagtgaaattcaattctaaaacgagagataaaggggagatccctgacgacatgggatcaaaaggcctgaagcatgtaacttctaatgccagcgatagtgaaagtagttaccgtggtcaagaagaatacgtcttatcttatgaaccagtgaatcaacaagaagttaattatactcgaccagtgatcatattgggacctatgaaagacaggataaatgatgacttgatctcagaatttcctgacaaatttggatcctgtgttcctcatacaactagaccaaaacgagattatgaggtagatggaagagattatcattttgtgacttcaagagagcagatggaaaaagatatccaggaacataaattcattgaagctggccagtataacaatcatctatatggaacaagtgttcagtctgtacgagaagtagcagaaaagggcaaacactgtatccttgatgtgtctggaaatgccataaagagattacagattgcacagctttaccctatctccatttttattaaacccaaatccatggaaaatatcatggaaatgaataagcgtctaacagaagaacaagccagaaaaacatttgagagagccatgaaactggaacaggagtttactgaacatttcacagctattgtacagggggatacgctggaagacatttacaaccaagtgaaacagatcatagaagaacaatctggttcttacatctgggttccggcaaaagaaaagctatgaaaactcatgtttctctgtttctcttttccacaattccattttctttggcatctctttgccctttcctctggagtctttcttgagtactgatttcatgttgaattgtatcccacacatcatggtctgcagcttctttttcacatgtagtgtctccttcaagttacatcgtgtgtattatttaatgtcactattggttagtggccatttttcagaactgaagatggaatggcctgaccagctattaagaacgtggggagacgcagaaattgtggtaaaattccttaatgtttaagggaaagtaactttaagagatttttggaaaagctttatatacattcttttcaaatttcagtacaaatgaaaaagtggttttaatcagtgatttagtagactttgagcaactgtgcacgcttcagtttaatagcatggtttggccagtgtattactctcaagtccttttctcaatcaacttctatcatcaaagcaattgtttcattatagataaataaggacattttttaatttaaaaattcatgtctgagttgactttcataagggatttcattttttcctcaacattcttaaagccttttagtatttgacggttcttttttcccaggacatttgctaggaataacaacgtttcaatgtttttaatctacttgagcaacactatcgtgtcttacaaaagttgttcatatgtaaatgatcatcacatttcgtgaattgaggccatgttcaggtgctaaggaagttcgccttttacacagaagattgagaaaatttcctagatataaatacagataaatcagacgttacagtggtgacgtagtaaccatcatggcaatggaaaggagtccaattcatagcctaaaacttcaaatgtattcttaggagtcagattttactgaatattttacccacaatagctgcctattttgttataataaaatatatataaatatatatataaaactttctttaaactgtaactatgggaattattttctttacatagttgcgcacacacacaaacatatatatatatttaaaatatattttgtttcttttgccacctactcctaactttttgtttggtttttaaattaaatattaattgaatagacttatcttccttaatcatgtgaactgaaaatgggggcatggtggtcatgaggaggaaacatttagggaaattagattataagtaaaagtgtgggcatattctcctcttttctacaaaggttttcaaatggttcctgaggttttttgttgttgtccgtgttgttactgttgttcttgtcatcaggtttgattttggtccttgccctttccttctagttctccttttattaataggaaggcaggcaaaagccccatttatgtgtgtgttttcccctcagacagctttcatccactgctctgcactagaattgcacaaatcttcatggtgagcaattttaagaaatgttagtgaaaggtagaaattatttcacaaatcagtttctctggtccttcatattaataataatatttggcttcccattgctctttggagttgtttattaaatatgtgtttttgacaacctcctcattagtttcttaaatgagtactggtttgtaaagaattatcaacattatccattccatttatgaagaagaggagaacagctaataaactgtattgtaaaatccatatgttaagtgtgtcttgaattttgaaagaaaaaatatattttgcaagctaacattttcttgaaacaatttgaggcatcatgtaacttataaccgaatccaagagccgttaggcagcagagtgtgttaccacattgaaatacacagtgctgctgttagactaaatgtcgtaggttgttaaccacatagaaacacactagtatgaagaaaactgttgtaaaatctcaagagcttcagaaactgccttacaagaccgcagcataagctattttgaagtatttaccaaatagtcacatgttgtaaaatatcaagtggttataaaaggatgccatttatatattaaaatttacataacattgttttctgga

SEQ ID NO: 161 - DNA, 3381 bp, Homo sapiens
ataagagctgggcccggcccacggcggcggcggcggcggcggagagagctggctcagggcgtccgctaggctcggacgacctgctgagcctcccaaaccgcttccataaggctttgcctttccaacttcagctacagtgttagctaagtttggaaagaaggaaaaaagaaaatccctgggccccttttcttttgttctttgccaaagtcgtcgttgtagtctttttgcccaaggctgttgtgtttttagaggtgctatctccagttccttgcactcctgttaacaagcacctcagcgagagcagcagcagcgatagcagccgcagaagagccagcggggtcgcctagtgtcatgaccagggcgggagatcacaaccgccagagaggatgctgtggatccttggccgactacctgacctctgcaaaattccttctctaccttggtcattctctctctacttggggagatcggatgtggcactttgcggtgtctgtgtttctggtagagctctatggaaacagcctccttttgacagcagtctacgggctggtggtggcagggtctgttctggtcctgggagccatcatcggtgactgggtggacaagaatgctagacttaaagtggcccagacctcgctggtggtacagaatgtttcagtcatcctgtgtggaatcatcctgatgatggttttcttacataaacatgagcttctgaccatgtaccatggatgggttctcacttcctgctatatcctgatcatcactattgcaaatattgcaaatttggccagtactgctactgcaatcacaatccaaagggattggattgttgttgttgcaggagaagacagaagcaaactagcaaatatgaatgccacaatacgaaggattgaccagttaaccaacatcttagcccccatggctgttggccagattatgacatttggctccccagtcatcggctgtggctttatttcgggatggaacttggtatccatgtgcgtggagtacgttctgctctggaaggtttaccagaaaaccccagctctagctgtgaaagctggtcttaaagaagaggaaactgaattgaaacagctgaatttacacaaagatactgagccaaaacccctggagggaactcatctaatgggtgtgaaagactctaacatccatgagcttgaacatgagcaagagcctacttgtgcctcccagatggctgagcccttccgtaccttccgagatggatgggtctcctactacaaccagcctgtgtttctggctggcatgggtcttgctttcctttatatgactgtcctgggctttgactgcatcaccacagggtacgcctacactcagggactgagtggttccatcctcagtattttgatgggagcatcagctataactggaataatgggaactgtagcttttacttggctacgtcgaaaatgtggtttggttcggacaggtctgatctcaggattggcacagctttcctgtttgatcttgtgtgtgatctctgtattcatgcctggaagccccctggacttgtccgtttctccttttgaagatatccgatcaaggttcattcaaggagagtcaattacacctaccaagatacctgaaattacaactgaaatatacatgtctaatgggtctaattctgctaatattgtcccggagacaagtcctgaatctgtgcccataatctctgtcagtctgctgtttgcaggcgtcattgctgctagaatcggtctttggtcctttgatttaactgtgacacagttgctgcaagaaaatgtaattgaatctgaaagaggcattataaatggtgtacagaactccatgaactatcttcttgatcttctgcatttcatcatggtcatcctggctccaaatcctgaagcttttggcttgctcgtattgatttcagtctcctttgtggcaatgggccacattatgtatttccgatttgcccaaaatactctgggaaacaagctctttgcttgcggtcctgatgcaaaagaagttaggaaggaaaatcaagcaaatacatctgttgtttgagacagtttaactgttgctatcctgttactagattatatagagcacatgtgcttattttgtactgcagaattccaataaatggctgggtgttttgctctgtttttaccacagctgtgccttgagaactaaaagctgtttaggaaacctaagtcagcagaaattaactgattaatttcccttatgttgaggcatggaaaaaaaattggaaaagaaaaactcagtttaaatacggagactataatgataacactgaattcccctatttctcatgagtagatacaatcttacgtaaaagagtggttagtcacgtgaattcagttatcatttgacagattcttatctgtactagaattcagatatgtcagttttctgcaaaactcactcttgttcaagactagctaatttatttttttgcatcttagttatttttaaaaacaaattcttcaagtatgaagactaaattttgataactaatattatccttattgatcctattgatcttaaggtatttacatgtatgtggaaaaacaaaacacttaactagaattctctaataaggtttatggtttagcttaaagagcacctttgtatttttattatcagatggggcaacatattgtatgaagcatatgtagcacttcacagcatggttatcatgtaagctgcaggtagaagcaaagctgtaaagtagatttatcacacaatgactgcatacagacttcaaatatgtcaatagtttggtcatagaacctagaagccaaaagccacacagaagggcaagaatcccaatttaactcatgttatcatcattagtgatctgtgttgtagaacatgagggtgtaagccttcagcctggcaagttacatgtagaaagcccacacttgtgaaggttttgttttacaaatcacttgatttaacacactcaggtagaatatttttatttttactgttttatacccagaagttatttctacattgttctacagcaagaatattcataaaagtatccctttcaaatgcctttgagaagaatagaagaaaaaaagtttgtatatattttaaaaaattgttttaaaagtcagtttgcaacatgtctgtaccaagatggtactttgccttaaccgtttatatgcactttcatggagactgcaatacgttgctatgagcactttctttatccttggagtttaatcctttgcttcatctttctacagtatgacataatgatttgctatgttgtaaaatctttgtaaaaaatttctatataaaaatattttgaaaatcttaaaaaaaaaaaaaaaaaaaaaaaaaaaa

SEQ ID NO: 162 - DNA, 1644 bp, Homo sapiens
gcgcgcgggtttcgttgacccgcggcgttcacgggaattgttcgctttagtgccggcgccatggggtcggagctgatcgggcgcctagccccgcgcctgggcctcgccgagcccgacatgctgaggaaagcagaggagtacttgcgcctgtcccgggtgaagtgtgtcggcctctccgcacgcaccacggagaccagcagtgcagtcatgtgcctggaccttgcagcttcctggatgaagtgccccttggacagggcttatttaattaaactttctggtttgaacaaggagacatatcagagctgtcttaaatcttttgagtgtttactgggcctgaattcaaatattggaataagagacctagctgtacagtttagctgtatagaagcagtgaacatggcttcaaagatactaaaaagctatgagtccagtcttccccagacacagcaagtggatcttgacttatccaggccacttttcacttctgctgcactgctttcagcatgcaagattctaaagctgaaagtggataaaaacaaaatggtagccacatccggtgtaaaaaaagctatatttgatcgactgtgtaaacaactagagaagattggacagcaggtcgacagagaacctggagatgtagctactccaccacggaagagaaagaagatagtggttgaagccccagcaaaggaaatggagaaggtagaggagatgccacataaaccacagaaagatgaagatctgacacaggattatgaagaatggaaaagaaaaattttggaaaatgctgccagtgctcaaaaggctacagcagagtgatttcagcttccaaactggtatacattccaaactgatagtacattgccatctccaggaagacttgacggctttgggattttgtttaaacttttataataaggatcctaagactgttgcctttaaatagcaaagcagcctacctggaggctaagtctgggcagtgggctggcccctggtgtgagcattagaccagccacagtgcctgattggtatagccttatgtgctttcctacaaaatggaattggaggccgggcgcagtggctcacgcctgtaatcccagcactttgggaggccaaggtgggtggatcacctgaggtcaggagctcgagaccagcctggccaacatggtgaaaccccatctctactaaaaatacaaaaattagccaggtgtgatggtgcatgcctgtaatcccagctcctcagtaggctgagacaggagcatcacttgaacgtgggaggcagaggttgcagtgagccgagattgcaccaccgcactccagcctgggtgacagagcgagacttatctcataaataaatagatagatactccagcctgggtgacagagcgagacttatagatagatagatagatagatggatagatagatagatagatagatagatagataaacggaattggagccattttgctttaagtgaatggcagtcccttgtcttattcagaatataaaattcagtctgaatggcatcttacagattttacttcaatttttgtgtacggtattttttatttgactaaatcaatatattgtacagcctaagttaataaatgttatttatatatgcaaaaaaaaaaaaaaaaa

SEQ ID NO: 163 - DNA, 763 bp, Homo sapiens
agaaacatccagaatacatttccaacaagagcactggccaagtcagcttcttctgagagagtctctagaagacatgatgctacactcagctttgggtctctgcctcttactcgtcacagtttcttccaaccttgccattgcaataaaaaaggaaaagaggcctcctcagacactctcaagaggatggggagatgacatcacttgggtacaaacttatgaagaaggtctcttttatgctcaaaaaagtaagaagccattaatggttattcatcacctggaggattgtcaatactctcaagcactaaagaaagtatttgcccaaaatgaagaaatacaagaaatggctcagaataagttcatcatgctaaaccttatgcatgaaaccactgataagaatttatcacctgatgggcaatatgtgcctagaatcatgtttgtagacccttctttaacagttagagctgacatagctggaagatactctaacagattgtacacatatgagcctcgggatttacccctattgatagaaaacatgaagaaagcattaagacttattcagtcagagctataagagatgatagaaaaaagccttcacttcaaagaagtcaaatttcatgaagaaaacctctggcacattgacaaatactaaatgtgcaagtatatagattttgtaatattactatttagtttttttaatgtgtttgcaatagtcttattaaaataaatgttttttaaatctgagactgaaaaaaaaaaaaaa

SEQ ID NO: 164 - DNA, 2912 bp, Homo sapiens
tgcacatgcgatctctgagatatgtacacagtcattcttactatcgcactcagccattcttactacgctaaagaagaaataattattcgaggatatttgcctggcccagaagaaacttatgtaaatttcatgaactattatatccgttttcctcggagtgagagaaaactctttttagatatcatctgagaggtagttaatttggcaccatggggatacagggattgctacaatttatcaaagaagcttcagaacccatccatgtgaggaagtataaagggcaggtagtagctgtggatacatattgctggcttcacaaaggagctattgcttgtgctgaaaaactagccaaaggtgaacctactgataggtatgtaggattttgtatgaaatttgtaaatatgttactatctcatgggatcaagcctattctcgtatttgatggatgtactttaccttctaaaaaggaagtagagagatctagaagagaaagacgacaagccaatcttcttaagggaaagcaacttcttcgtgaggggaaagtctcggaagctcgagagtgtttcacccggtctatcaatatcacacatgccatggcccacaaagtaattaaagctgcccggtctcagggggtagattgcctcgtggctccctatgaagctgatgcgcagttggcctatcttaacaaagcgggaattgtgcaagccataattacagaggactcggatctcctagcttttggctgtaaaaaggtaattttaaagatggaccagtttggaaatggacttgaaattgatcaagctcggctaggaatgtgcagacagcttggggatgtattcacggaagagaagtttcgttacatgtgtattctttcaggttgtgactacctgtcatcactgcgtgggattggattagcaaaggcatgcaaagtcctaagactagccaataatccagatatagtaaaggttatcaagaaaattggacattatctcaagatgaatatcacggtaccagaggattacatcaacgggtttattcgggccaacaataccttcctctatcagctagtttttgatcccatcaaaaggaaacttattcctctgaacgcctatgaagatgatgttgatcctgaaacactaagctacgctgggcaatatgttgatgattccatagctcttcaaatagcacttggaaataaagatataaatacttttgaacagatcgatgactacaatccagacactgctatgcctgcccattcaagaagtcgtagttgggatgacaaaacatgtcaaaagtcagctaatgttagcagcatttggcataggaattactctcccagaccagagtcgggtactgtttcagatgccccacaattgaaggaaaatccaagtactgtgggagtggaacgagtgattagtactaaagggttaaatctcccaaggaaatcatccattgtgaaaagaccaagaagtgcagagctgtcagaagatgacctgttgagtcagtattctctttcatttacgaagaagaccaagaaaaatagctctgaaggcaataaatcattgagcttttctgaagtgtttgtgcctgacctggtaaatggacctactaacaaaaagagtgtaagcactccacctaggacgagaaataaatttgcaacatttttacaaaggaaaaatgaagaaagtggtgcagttgtggttccagggaccagaagcaggtttttttgcagttcagattctactgactgtgtatcaaacaaagtgagcatccagcctctggatgaaactgctgtcacagataaagagaacaatctgcatgaatcagagtatggagaccaagaaggcaagagactggttgacacagatgtagcacgtaattcaagtgatgacattccgaataatcatattccaggtgatcatattccagacaaggcaacagtgtttacagatgaagagtcctactcttttaagagcagcaaatttacaaggaccatttcaccacccactttgggaacactaagaagttgttttagttggtctggaggtcttggagatttttcaagaacgccgagcccctctccaagcacagcattgcagcagttccgaagaaagagcgattcccccacctctttgcctgagaataatatgtctgatgtgtcgcagttaaagagcgaggagtccagtgacgatgagtctcatcccttacgagaaggggcatgttcttcacagtcccaggaaagtggagaattctcactgcagagttcaaatgcatcaaagctttctcagtgctctagtaaggactctgattcagaggaatctgattgcaatattaagttacttgacagtcaaagtgaccagacctccaagctatgtttatctcatttctcaaaaaaagacacacctctaaggaacaaggttcctgggctatataagtccagttctgcagactctctttctacaaccaagatcaaacttctaggacctgccagagccagtgggctgagcaagaagccggcaagcatccagaagagaaagcatcataatgccgagaacaagccggggttacagatcaaactcaatgagctctggaaaaactttggatttaaaaaagattctgaaaagcttcctccttgtaagaaacccctgtccccagtcagagataacatccaactaactccagaagcggaagaggatatatttaacaaacctgaatgtggccgtgttcaaagagcaatattccagtaaatgcagactgctgcaaagcttttgcctgcaagagaatctgatcaatttgaagtccctgtttgggaatgaggcacttatcagcatgaagaattttttctcattctgtgccattttaaaaatagaatacatttgtatattaactttaaaaaaaaaaaaaaaaaa

SEQ ID NO: 165 - DNA, 3471 bp, Homo sapiens
tttttccccttaagacaaagcaagcaccctaaaccagttaccctgtgcactcctgttaagattgttgctaaggaaggacaggagttggctgctgaagcctcaagatttcctttaggctcttaggtaagaaatgtctaaggttcaaggaaaaaggttaagttggaagaatcccaggcaaaataagtgcgaatccacgacagttggtaacccggacccacattagaactcagaggtcaagcagaagcgaacgactggaattccagtcaggcccgccccctttccttacgcggattggtagctgcaggcttccctatctgattggccgaacgaacgcagcgcgtaatttaaaatattgtatctgtaacaaagctgcacctcgtgggcggagttgtgctctgcggctgcgaaagtccagcttcggcgactaggtgtgagtaagccagtatcccaggaggagcaagtggcacgtcttcggacctaggctgcccctgccgtcatgtcgcaagggatcctttctccgccagcgggcttgctgtccgatgacgatgtcgtagtttctcccatgtttgagtccacagctgcagatttggggtctgtggtacgcaagaacctgctatcagactgctctgtcgtctctacctccctagaggacaagcagcaggttccatctgaggacagtatggagaaggtgaaagtatacttgagggttaggcccttgttaccttcagagttggaacgacaggaagatcagggttgtgtccgtattgagaatgtggagacccttgttctacaagcacccaaggactcttttgccctgaagagcaatgaacggggaattggccaagccacacacaggttcaccttttcccagatctttgggccagaagtgggacaggcatccttcttcaacctaactgtgaaggagatggtaaaggatgtactcaaagggcagaactggctcatctatacatatggagtcactaactcagggaaaacccacacgattcaaggtaccatcaaggatggagggattctcccccggtccctggcgctgatcttcaatagcctccaaggccaacttcatccaacacctgatctgaagcccttgctctccaatgaggtaatctggctagacagcaagcagatccgacaggaggaaatgaagaagctgtccctgctaaatggaggcctccaagaggaggagctgtccacttccttgaagaggagtgtctacatcgaaagtcggataggtaccagcaccagcttcgacagtggcattgctgggctctcttctatcagtcagtgtaccagcagtagccagctggatgaaacaagtcatcgatgggcacagccagacactgccccactacctgtcccggcaaacattcgcttctccatctggatctcattctttgagatctacaacgaactgctttatgacctattagaaccgcctagccaacagcgcaagaggcagactttgcggctatgcgaggatcaaaatggcaatccctatgtgaaagatctcaactggattcatgtgcaagatgctgaggaggcctggaagctcctaaaagtgggtcgtaagaaccagagctttgccagcacccacctcaaccagaactccagccgcagtcacagcatcttctcaatcaggatcctacaccttcagggggaaggagatatagtccccaagatcagcgagctgtcactctgtgatctggctggctcagagcgctgcaaagatcagaagagtggtgaacggttgaaggaagcaggaaacattaacacctctctacacaccctgggccgctgtattgctgcccttcgtcaaaaccagcagaaccggtcaaagcagaacctggttcccttccgtgacagcaagttgactcgagtgttccaaggtttcttcacaggccgaggccgttcctgcatgattgtcaatgtgaatccctgtgcatctacctatgatgaaactcttcatgtggccaagttctcagccattgctagccagcttgtgcatgccccacctatgcaactgggattcccatccctgcactcgttcatcaaggaacatagtcttcaggtatcccccagcttagagaaaggggctaaggcagacacaggccttgatgatgatattgaaaatgaagctgacatctccatgtatggcaaagaggagctcctacaagttgtggaagccatgaagacactgcttttgaaggaacgacaggaaaagctacagctggagatgcatctccgagatgaaatttgcaatgagatggtagaacagatgcaacagcgggaacagtggtgcagtgaacatttggacacccaaaaggaactattggaggaaatgtatgaagaaaaactaaatatcctcaaggagtcactgacaagtttttaccaagaagagattcaggagcgggatgaaaagattgaagagctagaagctctcttgcaggaagccagacaacagtcagtggcccatcagcaatcagggtctgaattggccctacggcggtcacaaaggttggcagcttctgcctccacccagcagcttcaggaggttaaagctaaattacagcagtgcaaagcagagctaaactctaccactgaagagttgcataagtatcagaaaatgttagaaccaccaccctcagccaagcccttcaccattgatgtggacaagaagttagaagagggccagaagaatataaggctgttgcggacagagcttcagaaacttggtgagtctctccaatcagcagagagagcttgttgccacagcactggggcaggaaaacttcgtcaagccttgaccacttgtgatgacatcttaatcaaacaggaccagactctggctgaactgcagaacaacatggtgctagtgaaactggaccttcggaagaaggcagcatgtattgctgagcagtatcatactgtgttgaaactccaaggccaggtttctgccaaaaagcgccttggtaccaaccaggaaaatcagcaaccaaaccaacaaccaccagggaagaaaccattccttcgaaatttacttccccgaacaccaacctgccaaagctcaacagactgcagcccttatgcccggatcctacgctcacggcgttcccctttactcaaatctgggccttttggcaaaaagtactaaggctgtggggaaagagaagagcagtcatggccctgaggtgggtcagctactctcctgaagaaataggtctcttttatgctttaccatatatcaggaattatatccaggatgcaatactcagacactagcttttttctcacttttgtattataaccacctatgtaatctcatgttgttgtttttttttatttacttatatgatttctatgcacacaaaaacagttatattaaagatattattgttcacattttttattgaattccaaatgtagcaaaatcattaaaacaaattataaaaggga

SEQ ID NO: 166 - DNA, 3944 bp, Homo sapiens
ctgttactgctgaggcagacctgccgggccagctgagcaactttcctcggagtgctgcctggcgctggctaggaggcaaacgcacgcgggaagagctgctacccattccagggaccctgccgctgcccctctgaggggtctgcacctcctgggagcaggtgggtctctgggacgagggtccatggtggatggctctggagacgctcccgaggctgtgccgtcccgctgctgcacaggtcggagggtcaccgcagaggctactcgggctggggctggggccgagggagcccgcactggagccccatgtggaacccaaggatgcagctgctctgctaacacggcagcccatccttcaagactgtgacctcgccacagtggccctcagccctccacctccggcgggggcgagggccacccacctccaagtctccagccatgacgacctccgcactccggcgccaggtgaagaacatcgtgcacaactactccgaggcagaaatcaaggtgcgcgaggccaccagcaatgacccctggggcccccctagttcgctcatgtccgagatcgctgacctgaccttcaacacagtggccttcaccgaagtcatgggcatgctgtggcggcggctcaatgacagcggcaagaactggcggcacgtgtacaaggctctaacattgctggactacctgctcaagacgggctccgagcgggtggcccaccagtgccgcgagaacctctacaccatccagacactcaaggacttccagtacatcgaccgcgacggcaaggaccagggcgtcaacgtgcgcgagaaggtcaagcaggtgatggccctgctcaaggatgaggagcggctgcggcaggagcgaacccacgccctcaagaccaaggagcgcatggcactggagggcatcggcattggcagtgggcagctgggcttcagccgccgctacggcgaggactacagccgctcccggggctccccgtcctcctacaactcctcctcttcgtcaccccgctatacctccgacctggagcaggcccggcctcagacgtcaggggaagaggaactgcagctgcagctggccctcgccatgagccgtgaggaggcagagaagcctgtccccccagcctcccacagggacgaggacctgcagctgcagctggctctgcgcctgagccggcaggagcacgagaaggaggtgaggtcctggcagggtgatggctcccccatggccaatggtgcaggggccgtggtccaccatcagcgggacagagagcctgagagagaagagagaaaggaggaggagaagctaaaaaccagccagtcctccatcctggacttggctgacatcttcgtacctgccctggccccgccctccacacactgctctgctgacccatgggacatcccaggttttaggccgaacacagaggccagtggatcctcctgggggccttctgcagacccctggtctccgatcccctcaggaaccgtcctgtcccgaagccagccctgggatctgactcccatgctctcctcctctgagccctggggcaggaccccagtgctgcctgctgggccccccaccacagacccctgggccctgaactctccccaccacaaactccccagcactggggctgacccttggggagcctccctggagacctccgacacacctggtggtgcctcgacctttgacccatttgccaaacctccagaatccacagagaccaaggaggggctggagcaggccctgccctctgggaagcccagcagccctgtggagctggacctgtttggagaccccagccccagttccaagcaaaatggcacgaaggagccagatgccctggacctgggcatactaggggaagcactaacccagccaagcaaagaggcccgagcttgccggactcccgagtccttcctgggtccctcagcttcctccttggtcaaccttgactcgttggtcaaggcaccccaggttgcaaagacccggaaccccttcctgacaggtctcagcgctccgtcccccaccaacccgttcggcgcgggcgagccgggcaggccgacgctaaaccagatgcgcaccggctcgccggcgctgggcctggcaggcgggcctgtgggggcgcccctgggctccatgacctacagcgcctctctgcccctcccgctcagcagcgtgccagctggcttgaccctccccgcctcggttagcgtcttcccgcaggccggagccttcgcaccgcagccgctgctgcccacgccgagctcagccgggccgcggcccccgcccccgcagaccggcaccaaccccttcctctgagccccgccccgtcccataccggcctgcgcctgcgccggacgctccgcggccccgcctccggacccggggctgggcggggcgccggtgctagtggaacgccgagccagtggcggctggtatcccgcggcggctctggaagctggacgcggaccacggcccgggagctagaaactgaacgcccgcataataaagactggaaccctcgttctcagctctcaccaagtggactttttgcggggtgtggcggccgggtctcgaccacagcgtggatcaccggctgtttaggaaactgcagctgcacaacgtggggtgcaaaactgccccgcttcctttacagctcttctcaaccctcacctccatcccccgtcacccaggcaccttcgcttccagatgctgccaggctgtcactcaattcggtcatttcattcatttatcacacatgggcactggggttgggctaacagcaagagacaataggcctttgttcctatttattgggtactgcttacgtgctaagcagatcagtttatttaatgcttgcaacgactctctgaggtagaaaatattgttaattccgttcaggatcccggctacataatctgtggggctcaatacaaaataaaaatgtaggggctccttgttcaaaatcgtatgaagaatttcaaaacagggacaacagagcatgaaaccaagcgcaaagcccactgcagtgcgattgcacaggtatctcaccttgcagccggcactactcccatttttcaggcaaggaaaccgtggctcagagaggttgaatggcatgctcaaagtcacaaagctggcatggggcggggctggaactcaagagtcagacagtctggctccaaggcctggagatcccaggctgggccccagatttaattcagcaaatattgactgactgctgtggacaaagtgctgggctcaccttggagggatccaacctccaggagctcgagcgcagcagggtagacaagccaggggcacgtgatgcggctgtggcagaagccaagtgcaggagctcccaggctcctttgttttactgagtcaccttaaatgtaactctgccctctcccttgcttcgccaaggctagcgagaaactcagtcttagccacacaggaggaatcggaccccttctgggggtttatgtggagtctgggaaaccaagggtggggtgaggcctggtactcaatccaggaggggcccctatgaccaccctcgcctgtttttcttctcaatgctccctgatcactggaccactggacactgatgtgtcctcagtgcttggggtctggctctgcaggcagcctgcagccagcctccatccccctttcagggacaaatggccttccaccagagtcggtgagtggagaggcacaatgccactccccttcctgaggtgggggtaggggaagggagtcccacaatgcagttacaaacaggatggacaagaacacctgctcaggagtcagacttacagggttcaaagttctgctccaaggtttgaccctaacaagaatcacttagtaataagtggttatgctctgtgaccttgagtaaattacttaccctctccaaaaaaaaaaaaaaaaaa

SEQ ID NO: 167 - DNA, 728 bp, Homo sapiens
gcggcctcagatgaatgcggctgttaagacctgcaataatccagaatggctactctgatctatgttgataaggaaaatggagaaccaggcacccgtgtggttgctaaggatgggctgaagctggggtctggaccttcaatcaaagccttagatgggagatctcaagtttcaacaccacgttttggcaaaacgttcgatgccccaccagccttacctaaagctactagaaaggctttgggaactgtcaacagagctacagaaaagtctgtaaagaccaagggacccctcaaacaaaaacagccaagcttttctgccaaaaagatgactgagaagactgttaaagcaaaaagctctgttcctgcctcagatgatgcctatccagaaatagaaaaattctttcccttcaatcctctagactttgagagttttgacctgcctgaagagcaccagattgcgcacctccccttgagtggagtgcctctcatgatccttgacgaggagagagagcttgaaaagctgtttcagctgggccccccttcacctgtgaagatgccctctccaccatgggaatccaatctgttgcagtctccttcaagcattctgtcgaccctggatgttgaattgccacctgtttgctgtgacatagatatttaaatttcttagtgcttcagagtttgtgtgtatttgtattaataaagcattcttcaacagaaaaaaaaaaaaaaaaa

SEQ ID NO: 168 - DNA, 2325 bp, Homo sapiens
actgcagcatcctggccgctgagcgcagcggccttggccgggctcagctcgcgtcctgccgcagtccctccgccgctagtcggagcgagcgcgagtgaggagacccccgccgggccactggcacttgcttctgcggcgagtcccacccacgaccgcagcccagcaactcgcaaacgcaacctgaagcctgggctgcgcagtgtgggagggcttcgcgatcttgggggacccattccgaacttgcagaggaccgtagctctcctggcctggagagtgtgaacaggattgtggactcttccaagattcacaatgatatggtgaatccaaagactggaaccaaaaagatttactcagtgctttagttttaacaacagtaaattgtctaccaacacccatcatggctaaaagtgcggaggtcaaactggcaatatttgggagagcaggcgtgggcaagtcagctcttgtagtgagatttctgaccaaacggttcatctgggaatatgatcccaccctcgaatcaacctaccgacaccaagcaaccatcgatgatgaagttgtttccatggagatactagacactgctggtcaggaagataccattcagagggaggggcacatgcgatggggggaaggctttgtgctggtctacgacattactgaccgaggaagttttgaggaagtgctgccacttaagaacatcctagatgagatcaaaaagcccaagaatgtgactctcatcttggttggaaacaaagctgacttggaccactccaggcaggttagcacagaagaaggagagaagctggccacagaattggcttgtgctttttacgagtgctctgcctgcactggagaagggaacatcacagagatattctatgaattgtgtcgagaggtgcgtcgccggaggatggtgcagggcaagacgaggcgacgcagctccaccacgcatgtcaagcaagccattaacaagatgctcaccaaaatcagtagttaggcagcccagctgaggtggaccaactaattggaaacactcttccccttctgttcccctttcaaaaataaaacaaaatattgcattctttgtttggattctgagaaatgtctgggcttcccattgtttctggcctctaataggttgggaagttttagcgtgttttatgcaatttcagtgctaacaatttcttcctttcctgcttgaataagatacactctaatggcatttgaacatgtaatcaccagagattctgaaatgactggtttatgttaagctatttttaggcatcttcaccttgctttaagtaggttgaagtttttgcaaaggcatttaaaaattcaatttcttgtcagatactacaaataattttcttaaaagtctaagatagcagaaaatacagtaaaaacacaggagaagaagctgagctattggaacaggaaatagaaggaactctagtttctgtttgaagtgaggattttctgaattatctaatatcatctaggttttctttaaaattttattttgttcttcagttcaagcatcttctcactaatgtttttcactataacagagaattcatttcaatttgagttggttctctcaatgatctattgatcattacaccctaactctccttccttggctcaaacaatattttccctataacaaaggcaataggacacaaaattcacatcctgctgggccttttttcatcaagtcagggtgatataaaaacattggaagtcttttcaccaaaccctgactttattgaatgctagtagaagatgtagaattagagacatctgatttgtttatcaccttagcagaaaaaccacagtccaaaagacaagcaaattaagaatggagcttaaccatgcctccattgggaagtctagactttgagccaggtacagtaagaaaaattagcctctgattcattaagtttgccacatgacttattttgatattttggatacattaactcacttaggagaattcagaaaagaatgggtgattaaagttcattacagctgaataaatgtgtctaaaacagactcttgtattctgaaagtacagtctacaactgataaaaccttatgattcttttctcccccattatgcccctatatatatcaagatttgggtactttattttagtagaaaatatatatcttttacatatgtatgtatttataaatgcatagatatatgtataaaaatttgtaagcgttagcggcattaattcaccaatgcatttggacaacttgatgtaactgactttattttatgtgactataataaaaagcataattttctcattctgtcat

SEQ ID NO: 169 - DNA, 2551 bp, Homo sapiens
cggccgcccacctgccgggtaagggcccctcgggcccgtggtcgggcatcgattggccccgcctggcgcagcccccgcccctgcagcggactgcggtgctcatcagacctgagcagttgctccggcggcgctcggggagggagccagcagcctagggcctaggcccgggccaccatggcgctgcctccaggcccagccgccctccggcacacactgctgctcctgccagcccttctgagctcaggttggggggagttggagccacaaatagatggtcagacctgggctgagcgggcacttcgggagaatgaacgccacgccttcacctgccgggtggcaggggggcctggcacccccagattggcctggtatctggatggacagctgcaggaggccagcacctcaagactgctgagcgtgggaggggaggccttctctggaggcaccagcaccttcactgtcactgcccatcgggcccagcatgagctcaactgctctctgcaggaccccagaagtggccgatcagccaacgcctctgtcatccttaatgtgcaattcaagccagagattgcccaagtcggcgccaagtaccaggaagctcagggcccaggcctcctggttgtcctgtttgccctggtgcgtgccaacccgccggccaatgtcacctggatcgaccaggatgggccagtgactgtcaacacctctgacttcctggtgctggatgcgcagaactacccctggctcaccaaccacacggtgcagctgcagctccgcagcctggcacacaacctctcggtggtggccaccaatgacgtgggtgtcaccagtgcgtcgcttccagccccagggcttctggctacccgggtggaagtgccactgctgggcattgttgtggctgctgggcttgcactgggcaccctcgtggggttcagcaccttggtggcctgcctggtctgcagaaaagagaagaaaaccaaaggcccctcccggcacccatctctgatatcaagtgactccaacaacctaaaactcaacaacgtgcgcctgccacgggagaacatgtccctcccgtccaaccttcagctcaatgacctcactccagattccagagcagtgaaaccagcagaccggcagatggctcagaacaacagccggccagagcttctggacccggagcccggcggcctcctcaccagccaaggtttcatccgcctcccagtgctgggctatatctatcgagtgtccagcgtgagcagtgatgagatctggctctgagccgagggcgagacaggagtattctcttggcctctggacaccctcccgttcctccaaggcatcctctacctagctaggtcaccaacgtgaagaagttatgccactgccacttttgcttgccctcctggctggggtgccctccatgtcatgcacgtgatgcatttcactgggctgtaacccgcaggggcacaggtatctttggcaaggctaccagttggacgtaagcccctcatgctgactcagggtgggccctgcatgtgatgactgggcccttccagagggagctctttggccaggggtgttcagatgtcatccagcatccaagtgtggcatggcctgctgtataccccaccccagtactccacagcaccttgtacagtaggcatgggggcgtgcctgtgtgggggacagggagggccctgcatggattttcctccttcctatgctatgtagccttgttccctcaggtaaaatttaggaccctgctagctgtgcagaacccaattgccctttgcacagaaaccaacccctgacccagcggtaccggccaagcacaaacgtcctttttgctgcacacgtctctgcccttcacttcttctcttctgtccccacctcctcttgggaattctaggttacacgttggaccttctctactacttcactgggcactagacttttctattggcctgtgccatcgcccagtattagcacaagttagggaggaagaggcaggcgatgagtctagtagcacccaggacggcttgtagctatgcatcattttcctacggcgttagcactttaagcacatcccctaggggagggggtgagtgaggggcccagagccctctttgtggcttccccacgtttggccttctgggattcactgtgagtgtcctgagctctcggggttgatggtttttctctcagcatgtctcctccaccacgggaccccagccctgaccaacccatggttgcctcatcagcaggaaggtgcccttcctggaggatggtcgccacaggcacataattcaacagtgtggaagctttaggggaacatggagaaagaaggagaccacataccccaaagtgacctaagaacactttaaaaagcaacatgtaaatgattggaaattaatatagtacagaatatatttttcccttgttgagatcttcttttgtaatgtttttcatgttactgcctagggcggtgctgagcacacagcaagtttaataaacttgactgaattcatttacaaaaaaaaaaaaaaaaaaaaaa

SEQ ID NO: 170 - DNA, 2021 bp, Homo sapiens
gcagggatttggcaacctcagagccgcgaggaggaggcggagtcgcggagagtttgagtatttccgtccaatcaaaaggagactgtaagaggaggaggaggaggagatgactggggagcgggagctggagaatactgcccagttactctagcgcgccaggccgaaccgcagcttcttggcttaggtacttctactcacagcggccgattccgaggccaactccagcaatggcttttgcaaatctgcggaaagtgctcatcagtgacagcctggacccttgctgccggaagatcttgcaagatggagggctgcaggtggtggaaaagcagaaccttagcaaagaggagctgatagcggagctgcaggactgtgaaggccttattgttcgctctgccaccaaggtgaccgctgatgtcatcaacgcagctgagaaactccaggtggtgggcagggctggcacaggtgtggacaatgtggatctggaggccgcaacaaggaagggcatcttggttatgaacacccccaatgggaacagcctcagtgccgcagaactcacttgtggaatgatcatgtgcctggccaggcagattccccaggcgacggcttcgatgaaggacggcaaatgggagcggaagaagttcatgggaacagagctgaatggaaagaccctgggaattcttggcctgggcaggattgggagagaggtagctacccggatgcagtcctttgggatgaagactatagggtatgaccccatcatttccccagaggtctcggcctcctttggtgttcagcagctgcccctggaggagatctggcctctctgtgatttcatcactgtgcacactcctctcctgccctccacgacaggcttgctgaatgacaacacctttgcccagtgcaagaagggggtgcgtgtggtgaactgtgcccgtggagggatcgtggacgaaggcgccctgctccgggccctgcagtctggccagtgtgccggggctgcactggacgtgtttacggaagagccgccacgggaccgggccttggtggaccatgagaatgtcatcagctgtccccacctgggtgccagcaccaaggaggctcagagccgctgtggggaggaaattgctgttcagttcgtggacatggtgaaggggaaatctctcacgggggttgtgaatgcccaggcccttaccagtgccttctctccacacaccaagccttggattggtctggcagaagctctggggacactgatgcgagcctgggctgggtcccccaaagggaccatccaggtgataacacagggaacatccctgaagaatgctgggaactgcctaagccccgcagtcattgtcggcctcctgaaagaggcttccaagcaggcggatgtgaacttggtgaacgctaagctgctggtgaaagaggctggcctcaatgtcaccacctcccacagccctgctgcaccaggggagcaaggcttcggggaatgcctcctggccgtggccctggcaggcgccccttaccaggctgtgggcttggtccaaggcactacgcctgtactgcaggggctcaatggagctgtcttcaggccagaagtgcctctccgcagggacctgcccctgctcctattccggactcagacctctgaccctgcaatgctgcctaccatgattggcctcctggcagaggcaggcgtgcggctgctgtcctaccagacttcactggtgtcagatggggagacctggcacgtcatgggcatctcctccttgctgcccagcctggaagcgtggaagcagcatgtgactgaagccttccagttccacttctaaccttggagctcactggtccctgcctctggggcttttctgaagaaacccacccactgtgatcaatagggagagaaaatccacattcttgggctgaacgcgggcctctgacactgcttacactgcactctgaccctgtagtacagcaataaccgtctaataaagagcctacccccaactccttctgcaaaaaaa

SEQ ID NO: 171 - DNA, 2032 bp, Homo sapiens
ggactctgggacgctcagacgccgcgcggggcggggattggtctgtggtcctctctcggctcctcgcggctcgcggcggccgacggttcctgggacacctgcttgcttggcccgtccggcggctcagggcttctctgctgcgctcccggttcgctggacgggaagaagggctgggccgtcccgtcccgtccccatcggaaccccaagtcgcgccgctgacccgtcgcagggcgagatgagcgcggacgcagcggccggggcgcccctgccccggctctgctgcctggagaagggtccgaacggctacggcttccacctgcacggggagaagggcaagttgggccagtacatccggctggtggagcccggctcgccggccgagaaggcggggctgctggcgggggaccggctggtggaggtgaacggcgaaaacgtggagaaggagacccaccagcaggtggtgagccgcatccgcgccgcactcaacgccgtgcgcctgctggtggtcgaccccgagacggacgagcagctgcagaagctcggcgtccaggtccgagaggagctgctgcgcgcccaggaagcgccggggcaggccgagccgccggccgccgccgaggtgcagggggctggcaacgaaaatgagcctcgcgaggccgacaagagccacccggagcagcgcgagcttcggcctcggctctgtaccatgaagaagggccccagtggctatggcttcaacctgcacagcgacaagtccaagccaggccagttcatccggtcagtggacccagactccccggctgaggcttcagggctccgggcccaggatcgcattgtggaggtgaacggggtctgcatggaggggaagcagcatggggacgtggtgtccgccatcagggctggcggggacgagaccaagctgctggtggtggacagggaaactgacgagttcttcaagaaatgcagagtgatcccatctcaggagcacctgaatggtcccctgcctgtgcccttcaccaatggggagatacagaaggagaacagtcgtgaagccctggcagaggcagccttggagagccccaggccagccctggtgagatccgcctccagtgacaccagcgaggagctgaattcccaagacagccccccaaaacaggactccacagcgccctcgtctacctcctcctccgaccccatcctagacttcaacatctccctggccatggccaaagagagggcccaccagaaacgcagcagcaaacgggccccgcagatggactggagcaagaaaaacgaactcttcagcaacctctgagcgccctgctgccacccagtgactggcagggccgagccagcattccaccccacctttttccttctccccaattactcccctgaatcaatgtacaaatcagcacccacatcccctttcttgacaaatgatttttctagagaactatgttcttccctgactttagggaaggtgaatgtgttcccgtcctcccgcagtcagaaaggagactctgcctccctcctcctcactgagtgcctcatcctaccgggtgtccctttgccaccctgcctgggacatcgctggaacctgcaccatgccaggatcatgggaccaggcgagagggcaccctcccttcctcccccatgtgataaatgggtccagggctgatcaaagaactctgactgcagaactgccgctctcagtggacagggcatctgttaccctgagacctgtggcagacacgtcttgttttcatttgatttttgttaagagtgcagtattgcagagtctagaggaatttttgtttccttgattaacatgattttcctggttgttacatccagggcatggcagtggcctcagccttaaacttttgttcctactcccaccctcagcgaactgggcagcacggggagggtttggctacccctgcccatccctgagccaggtaccaccattgtaaggaaacactttcagaaattcagctggttcctccaaacccttcaaaaaaaaaaaaaaaaa

SEQ ID NO: 172 - DNA, 1563 bp, Homo sapiens
cgcagagtttcaaatcggctgcggtgggcgaggagcagctgtgctgcggctgtgctcggccttagtggtgtcggggtctagtggacagagaagactcttggccaggcagatggcttctcggtggcagaacatggggacctccgtgcgccggagatctctccagcaccaggagcagctggaggacagcaaggagctgcagcctgtggtcagccatcaggagacctctgtaggggccctggggtccctgtgcagacagttccaaaggaggctgcccctgagagccgtcaacctcaacctccgcgcagggccctcctggaaacgcctggaaaccccagagccaggtcagcagggcctccaggctgcagctcgctcagctaagagtgctttgggtgccgtgtcccagagaatccaggagtcctgccaaagtggcaccaagtggctggtggagacccaggtgaaggccaggaggcggaagagaggagcacagaagggcagtggatccccaactcacagcctgagccagaagagcacccggctgtctggagccgcccctgcccactcagccgcagacccctgggagaaggagcatcaccgcctctctgtccggatgggctcacatgcccacccattacggcgatcaaggcgggaggctgccttccggagcccctactcctcaacagagcccctctgctctcccagcgagtctgacagtgacctagagcctgtgggggcgggaattcagcatctccagaagctgtcccaagagctagatgaagccattatggcggaagagagtggtgacatcgtctctctcattcatgactgaggaagtgcctgcaggaaacaagccctgtctgaccgccaaggcttcatactcaaggatgtctatgcttccccgtgagcttcctggaaaaaacccccgggagtcgtcagtacccctgggccactgctaacaagcacctaacaaggggcccagagccccctgctccagccacatctggacccatcagtgactgcctgccatagcctgagagtgtcttggggagaccttgcagagggggagaattgttccttctgctttcctaggggactcttgagcttagaaactcatcgtacacttgaccttgagccttctatttgcctcatctataacatgaagtgctagcatcagatatttgagagctcttagctctgtacccgggtgcctggtttttggggagtcatccgcagagtcactcacccactgtgtttctggtgccaaggctcttgagggccccactctcatccctcctttccctaccagggactcggaggaaggcataggagatatttccaggcttacgaccctgggctcacgggtacctatttatatgctcagtgcagagcactgtggatgtgccaggaggggtagccctgttcaagagcaatttctgccctttgtaaattatttaagaaacctgctttgtcattttattagaaagaaaccagcgtgtgactttcctagataacactgctttctcataataaagactatttgcatttgaaaaaaaaaaaaaaaaaaaa

SEQ ID NO: 173 - DNA, 5188 bp, Homo sapiens
gactgcgaaaggagcagggttgcggagctagggctccagcctgcggccgcgcattcttgcgtctggccagccgcgagctctaagggtcggccccgcccggtccgcccccgcggctccctgccaggctctcgcgggcgcgctcggggtggggcctcgcggctggcggagatgcggccggggctgcgcggtggtgatgcgagcctgctgggcggcgcgccggggcagccggagccgcgcgccgcggcgctgtaatcggacaccaagagcgctcgcccccggcctccggccactttccattcactccgaggtgcttgattgagcgacgcggagaagagctccgggtgccgcggcactgcagcgctgagattcctttacaaagaaactcagaggaccgggaagaaagaatttcacctttgcgacgtgctagaaaataaggtcgtctgggaaaaggactggagacacaagcgcatccaaccccggtagcaaactgatgacttttccgtgctgatttctttcaacctcggtattttcccttggatattaacttgcatatctgaagaaatggcattccggacaatttgcgtgttggttggagtatttatttgttctatctgtgtgaaaggatcttcccagccccaagcaagagtttatttaacatttgatgaacttcgagaaaccaagacctctgaatacttcagcctttcccaccatcctttagactacaggattttattaatggatgaagatcaggaccggatatatgtgggaagcaaagatcacattctttccctgaatattaacaatataagtcaagaagctttgagtgttttctggccagcatctacaatcaaagttgaagaatgcaaaatggctggcaaagatcccacacacggctgtgggaactttgtccgtgtaattcagactttcaatcgcacacatttgtatgtctgtgggagtggcgctttcagtcctgtctgtacttacttgaacagagggaggagatcagaggaccaagttttcatgattgactccaagtgtgaatctggaaaaggacgctgctctttcaaccccaacgtgaacacggtgtctgttatgatcaatgaggagcttttctctggaatgtatatagatttcatggggacagatgctgctatttttcgaagtttaaccaagaggaatgcggtcagaactgatcaacataattccaaatggctaagtgaacctatgtttgtagatgcacatgtcatcccagatggtactgatccaaatgatgctaaggtgtacttcttcttcaaagaaaaactgactgacaataacaggagcacgaaacagattcattccatgattgctcgaatatgtcctaatgacactggtggactgcgtagccttgtcaacaagtggaccactttcttaaaggcgaggctggtgtgctcggtaacagatgaagacggcccagaaacacactttgatgaattagaggatgtgtttctgctggaaactgataacccgaggacaacactagtgtatggcatttttacaacatcaagctcagttttcaaaggatcagccgtgtgtgtgtatcatttatctgatatacagactgtgtttaatgggccttttgcccacaaagaagggcccaatcatcagctgatttcctatcagggcagaattccatatcctcgccctggaacttgtccaggaggagcatttacacccaatatgcgaaccaccaaggagttcccagatgatgttgtcacttttattcggaaccatcctctcatgtacaattccatctacccaatccacaaaaggcctttgattgttcgtattggcactgactacaagtatacaaagatagctgtggatcgagtgaacgctgctgatgggagataccatgtcctgtttctcggaacagatcggggtactgtgcaaaaagtggttgttcttcctactaacaactctgtcagtggcgagctcattctggaggagctggaagtctttaagaatcatgctcctataacaacaatgaaaatttcatctaaaaagcaacagttgtatgtgagttccaatgaaggggtttcccaggtatctctgcaccgctgccacatctatggtacagcctgtgctgactgctgcctggcgcgggacccttattgcgcctgggatggccattcctgttccagattctacccaactgggaaacggaggagccgaagacaagatgtgagacatggaaacccactgactcaatgcagaggatttaatctaaaagcatacagaaatgcagctgaaattgtccagtatggagtaaaaaataacaccacttttctggagtgtgcccccaagtctccgcaggcatctatcaagtggctgttacagaaagacaaagacaggaggaaagaggttaagctgaatgaacgaataatagccacttcacagggactcctgatccgctctgttcagggttctgaccaaggactttatcactgcattgctacagaaaatagtttcaagcagaccatagccaagatcaacttcaaagttttagattcagaaatggtggctgttgtgacggacaaatggtccccatggacctgggccagctctgtgagggctttacccttccacccgaaggacatcatgggggcattcagccactcagaaatgcagatgattaaccaatattgcaaagacactcggcagcaacatcagcagggagatgaatcacagaaaatgagaggggactatggcaagttaaaggccctcatcaatagtcggaaaagtagaaacaggaggaatcagttgccagagtcataatattttcttatgtgggtcttatgcttccattaacaaatgctctgtcttcaatgatcaaattttgagcaaagaaacttgtgctttaccaaggggaattactgaaaaaggtgattactcctgaagtgagttttacacgaactgaaatgagcatgcattttcttgtatgatagtgactagcactagacatgtcatggtcctcatggtgcatataaatatatttaacttaacccagattttatttatatctttattcaccttttcttcaaaatcgatatggtggctgcaaaactagaattgttgcatccctcaattgaatgagggccatatccctgtggtattcctttcctgctttggggctttagaattctaattgtcagtgattttgtatatgaaaacaagttccaaatccacagcttttacgtagtaaaagtcataaatgcatatgacagaatggctatcaaaagaaatagaaaaggaagacagcatttaaagttgtataaaaacatgagttattcataaagagaaaatgatgagtttttatggttccaatgaaatatgttggggtttttttaagattgtaaaaataatcagttactggtatctgtcactgacctttgtttccttattcaggaagataaaaatcagtaacctaccccatgaagatatttggtgggagttatatcagtgaagcagtttggtttatattcttatgttatcaccttccaaacaaaagcacttactttttttggaagttatttattttagactcaaagaatataatctggcactactcagttattactgtttgttctcttattccctagtctgtgtggcaaattaaacaatataagaaggaaaaatttgaagtattagacttctaaataaggtgtgaaatcatcaaaaagaaaaatcaaagtagaaactactaattttttaagaggaatttataacaaatatggctagttttcaacttcagtactcaaattcaatgattcttccttttattaaaaccagtctcagatatcatactgatttttaagtcaacactatatattttatgatcttttcagtgtgatggcaaggtgcttgttatgtctagaaagtaagaaaacaatatgaggagacattctgtctttcaaaaggtaatggtacatacgttcactggtctctaagtgtaaaagtagtaaattttgtgatgaataaaataattatctcctaattgtatgttagaataattttattagaataatttcatactgaaattattttctccaaataaaaattagatggaaaaatgtgaaaaaaattattcatgctctcatatatattttaaaaacactacttttgcttttttatttaccttttaagacattttcatgcttccaggtaaaaacagatattgtaccatgtacctaatccaaatatcatataaacattttatttatagttaataatctatgatgaaggtaattaaagtagattatggcctttttaagtattgcagtctaaaacttcaaaaactaaaatcattgtcaaaattaatatgattattaatcagaatatcagaatatgattcactatttaaactatgataaattatgataatatatgaggaggcctcgctatagcaaaaatagttaaaatgctgacataacaccaaacttcattttttaaaaaatctgttgttccaaatgtgtataattttaaagtaatttctaaagcagtttattataatggtttgcctgcttaaaaggtataattaaacttcttttctcttctacattgacacacagaaatgtgtcaatgtaaagccaaaaccatcttctgtgtttatggccaatctattctcaaagttaaaagtaaaattgtttcagagtcacagttccctttatttcacataagcccaaactgatagacagtaacggtgtttagttttatactatatttgtgctatttaattctttctattttcacaattattaaattgtgtacactttcattacttttaaaaatgtagaaattcttcatgaacataactctgctgaatgtaaaagaaaattttttttcaaaaatgctgttaatgtatactactggtggttgattggttttattttatgtagcttgacaattcagtgacttaatatctattccatttgtattgtacataaaattttctagaaatacacttttttccaaagtgtaagtttgtgaatagattttagcatgatgaaactgtcataatggtgaatgttcaatctgtgtaagaaaacaaactaaatgtagttgtcacactaaaatttaattggatattgatgaaatcattggcctggcaaaataaaacatgttgaattccccaaaaaaaaaaaaaaaa

SEQ ID NO: 174 - DNA, 12287 bp, Homo sapiens
agctgaaggcaaagggtccccgggctccccacgtggcgggcggcccgccctcccccgaggtcggatccccactgctgtgtcgcccagccgcaggtccgttcccggggagccagacctcggacaccttgcctgaagtttcggccatacctatctccctggacgggctactcttccctcggccctgccagggacaggacccctccgacgaaaagacgcaggaccagcagtcgctgtcggacgtggagggcgcatattccagagctgaagctacaaggggtgctggaggcagcagttctagtcccccagaaaaggacagcggactgctggacagtgtcttggacactctgttggcgccctcaggtcccgggcagagccaacccagccctcccgcctgcgaggtcaccagctcttggtgcctgtttggccccgaacttcccgaagatccaccggctgcccccgccacccagcgggtgttgtccccgctcatgagccggtccgggtgcaaggttggagacagctccgggacggcagctgcccataaagtgctgccccggggcctgtcaccagcccggcagctgctgctcccggcctctgagagccctcactggtccggggccccagtgaagccgtctccgcaggccgctgcggtggaggttgaggaggaggatggctctgagtccgaggagtctgcgggtccgcttctgaagggcaaacctcgggctctgggtggcgcggcggctggaggaggagccgcggctgtcccgccgggggcggcagcaggaggcgtcgccctggtccccaaggaagattcccgcttctcagcgcccagggtcgccctggtggagcaggacgcgccgatggcgcccgggcgctccccgctggccaccacggtgatggatttcatccacgtgcctatcctgcctctcaatcacgccttattggcagcccgcactcggcagctgctggaagacgaaagttacgacggcggggccggggctgccagcgcctttgccccgccgcggagttcaccctgtgcctcgtccaccccggtcgctgtaggcgacttccccgactgcgcgtacccgcccgacgccgagcccaaggacgacgcgtaccctctctatagcgacttccagccgcccgctctaaagataaaggaggaggaggaaggcgcggaggcctccgcgcgctccccgcgttcctaccttgtggccggtgccaaccccgcagccttcccggatttcccgttggggccaccgcccccgctgccgccgcgagcgaccccatccagacccggggaagcggcggtgacggccgcacccgccagtgcctcagtctcgtctgcgtcctcctcggggtcgaccctggagtgcatcctgtacaaagcggagggcgcgccgccccagcagggcccgttcgcgccgccgccctgcaaggcgccgggcgcgagcggctgcctgctcccgcgggacggcctgccctccacctccgcctctgccgccgccgccggggcggcccccgcgctctaccctgcactcggcctcaacgggctcccgcagctcggctaccaggccgccgtgctcaaggagggcctgccgcaggtctacccgccctatctcaactacctgaggccggattcagaagccagccagagcccacaatacagcttcgagtcattacctcagaagatttgtttaatctgtggggatgaagcatcaggctgtcattatggtgtccttacctgtgggagctgtaaggtcttctttaagagggcaatggaagggcagcacaactacttatgtgctggaagaaatgactgcatcgttgataaaatccgcagaaaaaactgcccagcatgtcgccttagaaagtgctgtcaggctggcatggtccttggaggtcgaaaatttaaaaagttcaataaagtcagagttgtgagagcactggatgctgttgctctcccacagccagtgggcgttccaaatgaaagccaagccctaagccagagattcactttttcaccaggtcaagacatacagttgattccaccactgatcaacctgttaatgagcattgaaccagatgtgatctatgcaggacatgacaacacaaaacctgacacctccagttctttgctgacaagtcttaatcaactaggcgagaggcaacttctttcagtagtcaagtggtctaaatcattgccaggttttcgaaacttacatattgatgaccagataactctcattcagtattcttggatgagcttaatggtgtttggtctaggatggagatcctacaaacacgtcagtgggcagatgctgtattttgcacctgatctaatactaaatgaacagcggatgaaagaatcatcattctattcattatgccttaccatgtggcagatcccacaggagtttgtcaagcttcaagttagccaagaagagttcctctgtatgaaagtattgttacttcttaatacaattcctttggaagggctacgaagtcaaacccagtttgaggagatgaggtcaagctacattagagagctcatcaaggcaattggtttgaggcaaaaaggagttgtgtcgagctcacagcgtttctatcaacttacaaaacttcttgataacttgcatgatcttgtcaaacaacttcatctgtactgcttgaatacatttatccagtcccgggcactgagtgttgaatttccagaaatgatgtctgaagttattgctgcacaattacccaagatattggcagggatggtgaaaccccttctctttcataaaaagtgaatgtcatctttttcttttaaagaattaaattttgtggtatgtctttttgttttggtcaggattatgaggtcttgagtttttataatgttcttctgaaagccttacatttataacatcatagtgtgtaaatttaaaagaaaaattgtgaggttctaattattttcttttataaagtataattagaatgtttaactgttttgtttacccatattttcttgaagaatttacaagattgaaaaagtactaaaattgttaaagtaaactatcttatccatattatttcataccatgtaggtgaggatttttaacttttgcatctaacaaatcatcgacttaagagaaaaaatcttacatgtaataacacaaagctattatatgttatttctaggtaactccctttgtgtcaattatatttccaaaaatgaacctttaaaatggtatgcaaaattttgtctatatatatttgtgtgaggaggaaattcataactttcctcagattttcaaaagtatttttaatgcaaaaaatgtagaaagagtttaaaaccactaaaatagattgatgttcttcaaactaggcaaaacaactcatatgttaagaccattttccagattggaaacacaaatctcttaggaagttaataagtagattcatatcattatgcaaatagtattgtgggttttgtaggtttttaaaataaccttttttggggagagaattgtcctctaatgaggtattgcgagtggacataagaaatcagaagattatggcctaactgtactccttaccaactgtggcatgctgaaagttagtcactcttactgattctcaattctctcacctttgaaagtagtaaaatatctttcctgccaattgctcctttgggtcagagcttattaacatcttttcaaatcaaaggaaagaagaaagggagaggaggaggagggaggtatcaattcacatacctttctcctctttatcctccactatcatgaattcatattatgtttcagccatgcaaatctttttaccatgaaatttcttccagaattttccccctttgacacaaattccatgcatgtttcaaccttcgagactcagccaaatgtcatttctgtaaaatcttccctgagtcttccaagcagtaatttgccttctcctagagtttacctgccattttgtgcacatttgagttacagtagcatgttattttacaattgtgactctcctgggagtctgggagccatataaagtggtcaatagtgtttgctgactgagagttgaatgacattttctctctgtcttggtattactgtagatttcgatcattctttggttacatttctgcatatttctgtacccatgactttatcactttcttctcccatgctttatctccatcaattatcttcattacttttaaattttccacctttgcttcctactttgtgagatctctccctttactgactataacatagaagaatagaagtgtattttatgtgtcttaaggacaatactttagattccttgttctaagtttttaaactgaatgaatggaatattatttctctccctaagcaaaattccacaaaacaattatttcttatgtttatgtagccttaaattgttttgtactgtaaacctcagcataaaaactttcttcatttctaatttcattcaacaaatattgattgaatacctggtattagcacaagaaaaatgtgctaataagccttatgagaatttggagctgaagaaagacatataactcaggaaagttacagtccagtagtaggtataaattacagtgcctgataaataggcattttaatatttgtacactcaacgtatactaggtaggtgcaaaacatttacatataattttactgatacccatgcagcacaaaggtactaactttaaatattaaataacacctttatgtgtcagtaattcatttgcattaaatcttattgaaaaggctttcaatatattttccccacaaatgtcatcccaagaaaaaagtatttttaacatctcccaaatataatagttacaggaaatctacctctgtgagagtgacacctctcagaatgaactgtgtgacacaagaaaatgaatgtaggtctatccaaaaaaaaccccaagaaacaaaaacaatattattagccctttatgcttaagtgatggactcagggaacagttgatgttgtgatcattttattatctgattcttgttactttgaattaaaccaatattttgatgatataaatcatttccaccagcatatatttaatttccataataactttaaaattttctaatttcactcaactatgagggaatagaatgtggtggccacaggtttggcttttgttaaaatgtttgatatcttcgatgttgatctctgtctgcaatgtagatgtctaaacactaggatttaatatttaaggctaagctttaaaaataaagtacctttttaaaaagaatatggcttcaccaaatggaaaatacctaatttctaaatctttttctctacaaagtcctatctactaatgtctccattactatttagtcatcataaccattatcttcattttacatgtcgtgttctttctggtagctctaaaatgacactaaatcataagaagacaggttacatatcaggaaatacttgaaggttactgaaatagattcttgagttaatgaaaatattttctgtaaaaaggtttgaaaagccatttgagtctaaagcattatacctccattatcagtagttatgtgacaattgtgtgtgtgtttaatgtttaaagatgtggcactttttaataaggcaatgctatgctattttttcccatttaacattaagataatttattgctatacagatgatatggaaatatgatgaacaatattttttttgccaaaactatgccttgtaagtagccatggaatgtcaacctgtaacttaaattatccacagatagtcatgtgtttgatgatgggcactgtggagataactgacataggactgtgccccccttctctgccacttactagctggatgagattaagcaagtcatttaactgctctgattaaacctgcctttcccaagtgctttgtaatgaatagaaatggaaaccaaaaaaaacgtatacaggccttcagaaatagtaattgctactattttgttttcattaagccatagttctggctataattttatcaaactcaccagctatattctacagtgaaagcaggattctagaaagtctcactgttttatttatgtcaccatgtgctatgatatatttggttgaattcatttgaaattagggctggaagtattcaagtaatttcttctgctgaaaaaatacagtgttttgagtttagggcctgttttatcaaagttctaaagagcctatcactcttccattgtagacattttaaaataatgacactgattttaacatttttaagtgtctttttagaacagagagcctgactagaacacagcccctccaaaaacccatgctcaaattatttttactatggcagcaattccacaaaagggaacaatgggtttagaaattacaatgaagtcatcaacccaaaaaacatccctatccctaagaaggttatgatataaaatgcccacaagaaatctatgtctgctttaatctgtcttttattgctttggaaggatggctattacatttttagtttttgctgtgaatacctgagcagtttctctcatccatacttatccttcacacatcagaagtcaggatagaatatgaatcattttaaaaacttttacaactccagagccatgtgcataagaagcattcaaaacttgccaaaacatacattttttttcaaatttaaagatactctatttttgtattcaatagctcaacaactgtggtccccactgataaagtgaagtggacaaggagacaagtaatggcataagtttgtttttcccaaagtatgcctgttcaatagccattggatgtgggaaatttctacatctcttaaaattttacagaaaatacatagccagatagtctagcaaaagttcaccaagtcctaaattgcttatccttacttcactaagtcatgaaatcattttaatgaaaagaacatcacctaggttttgtggtttctttttttcttattcatggctgagtgaaaacaacaatctctgtttctccctagcatctgtggactatttaatgtaccattattccacactctatggtccttactaaatacaaaattgaacaaaaagcagtaaaacaactgactcttcacccatattataaaatataatccaagccagattagtcaacatccataagatgaatccaagctgaactgggcctagattattgagttcaggttggatcacatccctatttattaataaacttaggaaagaaggccttacagaccatcagttagctggagctaatagaacctacacttctaaagttcggcctagaatcaatgtggccttaaaagctgaaaagaagcaggaaagaacagttttcttcaataatttgtccaccctgtcactggagaaaatttaagaatttgggggtgttggtagtaagttaaacacagcagctgttcatggcagaaattattcaatacataccttctctgaatatcctataaccaaagcaaagaaaaacaccaaggggtttgttctcctccttggagttgacctcattccaaggcagagctcaggtcacaggcacaggggctgcgcccaagcttgtccgcagccttatgcagctgtggagtctggaagactgttgcaggactgctggcctagtcccagaatgtcagcctcattttcgatttactggctcttgttgctgtatgtcatgctgaccttattgttaaacacaggtttgtttgctttttttccactcatggagacatgggagaggcattatttttaagctggttgaaagctttaaccgataaagcatttttagagaaatgtgaatcaggcagctaagaaagcatactctgtccattacggtaaagaaaatgcacagattattaactctgcagtgtggcattagtgtcctggtcaatattcggatagatatgaataaaatatttaaatggtattgtaaatagttttcaggacatatgctatagcttatttttattatcttttgaaattgctcttaatacatcaaatcctgatgtattcaatttatcagatataaattattctaaatgaagcccagttaaatgtttttgtcttgtcagttatatgttaagtttctgatctctttgtctatgacgtttactaatctgcatttttactgttatgaattattttagacagcagtggtttcaagctttttgccactaaaaataccttttattttctcctcccccagaaaagtctataccttgaagtatctatccaccaaactgtacttctattaagaaatagttattgtgttttcttaatgttttgttattcaaagacatatcaatgaaagctgctgagcagcatgaataacaattatatccacacagatttgatatattttgtgcagccttaacttgatagtataaaatgtcattgctttttaaataatagttagtcaatggacttctatcatagctttcctaaactaggttaagatccagagctttggggtcataatatattacatacaattaagttatctttttctaagggctttaaaattcatgagaataaccaaaaaaggtatgtggagagttaatacaaacataccatattcttgttgaaacagagatgtggctctgcttgttctccataaggtagaaatactttccagaatttgcctaaactagtaagccctgaatttgctatgattagggataggaagagattttcacatggcagactttagaattcttcactttagccagtaaagtatctccttttgatcttagtattctgtgtattttaacttttctgagttgtgcatgtttataagaaaaatcagcacaaagggtttaagttaaagcctttttactgaaatttgaaagaaacagaagaaaatatcaaagttctttgtattttgagaggattaaatatgatttacaaaagttacatggagggctctctaaaacattaaattaattattttttgttgaaaagtcttactttaggcatcattttattcctcagcaactagctgtgaagcctttactgtgctgtatgccagtcactctgctagattgtggagattaccagtgttcccgtcttctccgagcttagagttggatggggaataaagacaggtaaacagatagctacaatattgtactgtgaatgcttatgctggaggaagtacagggaactattggagcacctaagaggagcacctaccttgaatttaggggttagcagaggcatcctgaaaaaagtcaaagctaagccacaatctataagcagtttaggaattagcagaacgtgcgtggtgaggagatgccaaaggcaagaagagaagagtattccaaacaggagggattccaaagagagaagagtatcccaaacaacatttgcacaaacctgatggggagagagaatgtggggtggggatggatgatgagactgaagaagaaagccaggtctagataatcagtggccttgtacaccatgttaaagagtgtagacttgattctgttgtaaacaggaaagcagcacaattcatatgaatattttagaagactcccactggaatatggagaataaagttggagatgactaatcctggaagcagggagaacatttttgaggaagttgcactattttggtgaaaatgatgatcataaacatgaagaattgtaggtgatcatgacctcctctctaattttccagaagggttttggaagatataacataggaacattgacaggactgacgaaaggagatgaaatacaccatataaattgtcaaacacaaggccagatgtctaattattttgcttatgtgttgaaattacaaatttttcatcaggaaaccaaaaactacaaaacttagttttcccaagtcccagaattctatctgtccaaacaatctgtaccactccacctatatccctacctttgcatgtctgtccaacctcaaagtccaggtctatacacacgggtaagactagagcagttcaagtttcagaaaatgagaaagaggaactgagttgtgctgaacccatacaaaataaacacattctttgtatagattcttggaacctcgagaggaattcacctaactcataggtatttgatggtatgaatccatggctgggctcggcttttaaaaagccttatctgggattccttctatggaaccaagttccatcaaagcccatttaaaagcctacattaaaaacaaaattcttgctgcattgtatacaaataatgatgtcatgatcaaataatcagatgccattatcaagtggaattacaaaatggtatacccactccaaaaaaaaaaaaaaagctaaattctcagtagaacattgtgacttcatgagccctccacagccttggagctgaggagggagcactggtgagcagtaggttgaagagaaaacttggcgcttaataatctatccatgttttttcatctaaaagagccttctttttggattaccttattcaatttccatcaaggaaattgttagttccactaaccagacagcagctgggaaggcagaagcttactgtatgtacatggtagctgtgggaaggaggtttctttctccaggtcctcactggccatacaccagtcccttgttagttatgcctggtcatagacccccgttgctatcatctcatatttaagtctttggcttgtgaatttatctattctttcagcttcagcactgcagagtgctgggactttgctaacttccatttcttgctggcttagcacattcctcataggcccagctcttttctcatctggccctgctgtggagtcaccttgccccttcaggagagccatggcttaccactgcctgctaagcctccactcagctgccaccacactaaatccaagcttctctaagatgttgcagactttacaggcaagcataaaaggcttgatcttcctggacttccctttacttgtctgaatctcacctccttcaactttcagtctcagaatgtaggcatttgtcctctttgccctacatcttccttcttctgaatcatgaaagcctctcacttcctcttgctatgtgctggaggcttctgtcaggttttagaatgagttctcatctagtcctagtagcttttgatgcttaagtccaccttttaaggatacctttgagatttagaccatgtttttcgcttgagaaagccctaatctccagacttgcctttctgtggatttcaaagaccaactgaggaagtcaaaagctgaatgttgactttctttgaacatttccgctataacaattccaattctcctcagagcaatatgcctgcctccaactgaccaggagaaaggtccagtgccaaagagaaaaacacaaagattaattatttcagttgagcacatactttcaaagtggtttgggtattcatatgaggttttctgtcaagagggtgagactcttcatctatccatgtgtgcctgacagttctcctggcactggctggtaacagatgcaaaactgtaaaaattaagtgatcatgtattttaacgatatcatcacatacttattttctatgtaatgttttaaatttcccctaacatactttgactgttttgcacatggtagatattcacatttttttgtgttgaagttgatgcaatcttcaaagttatctaccccgttgcttattagtaaaactagtgttaatacttggcaagagatgcagggaatctttctcatgactcacgccctatttagttattaatgctactaccctattttgagtaagtagtaggtccctaagtacattgtccagagttatacttttaaagatatttagccccatatacttcttgaatctaaagtcatacaccttgctcctcatttctgagtgggaaagacatttgagagtatgttgacaattgttctgaaggtttttgccaagaaggtgaaactgtcctttcatctgtgtatgcctggggctgggtccctggcagtgatggggtgacaatgcaaagctgtaaaaactaggtgctagtgggcacctaatatcatcatcatatacttattttcaagctaatatgcaaaatcccatctctgtttttaaactaagtgtagatttcagagaaaatattttgtggttcacataagaaaacagtctactcagcttgacaagtgttttatgttaaattggctggtggtttgaaatgaatcatcttcacataatgttttctttaaaaatattgtgaatttaactctaattcttgttattctgtgtgataataaagaataaactaatttcta

SEQ ID NO: 175 - DNA, 6492 bp, Homo sapiens
tttctgtgaagcagaagtctgggaatcgatctggaaatcctcctaatttttactccctctccccgcgactcctgattcattgggaagtttcaaatcagctataactggagagtgctgaagattgatgggatcgttgccttatgcatttgttttggttttacaaaaaggaaacttgacagaggatcatgctgtacttaaaaaatacaacatcacagaggaagtagactgatattaacaatacttactaataataacgtgcctcatgaaataaagatccgaaaggaattggaataaaaatttcctgcatctcatgccaagggggaaacaccagaatcaagtgttccgcgtgattgaagacaccccctcgtccaagaatgcaaagcacatccaataaaatagctggattataactcctcttctttctctgggggccgtggggtgggagctggggcgagaggtgccgttggcccccgttgcttttcctctgggaaggatggcgcacgctgggagaacagggtacgataaccgggagatagtgatgaagtacatccattataagctgtcgcagaggggctacgagtgggatgcgggagatgtgggcgccgcgcccccgggggccgcccccgcaccgggcatcttctcctcccagcccgggcacacgccccatccagccgcatcccgggacccggtcgccaggacctcgccgctgcagaccccggctgcccccggcgccgccgcggggcctgcgctcagcccggtgccacctgtggtccacctgaccctccgccaggccggcgacgacttctcccgccgctaccgccgcgacttcgccgagatgtccagccagctgcacctgacgcccttcaccgcgcggggacgctttgccacggtggtggaggagctcttcagggacggggtgaactgggggaggattgtggccttctttgagttcggtggggtcatgtgtgtggagagcgtcaaccgggagatgtcgcccctggtggacaacatcgccctgtggatgactgagtacctgaaccggcacctgcacacctggatccaggataacggaggctgggatgcctttgtggaactgtacggccccagcatgcggcctctgtttgatttctcctggctgtctctgaagactctgctcagtttggccctggtgggagcttgcatcaccctgggtgcctatctgggccacaagtgaagtcaacatgcctgccccaaacaaatatgcaaaaggttcactaaagcagtagaaataatatgcattgtcagtgatgtaccatgaaacaaagctgcaggctgtttaagaaaaaataacacacatataaacatcacacacacagacagacacacacacacacaacaattaacagtcttcaggcaaaacgtcgaatcagctatttactgccaaagggaaatatcatttattttttacattattaagaaaaaaagatttatttatttaagacagtcccatcaaaactcctgtctttggaaatccgaccactaattgccaagcaccgcttcgtgtggctccacctggatgttctgtgcctgtaaacatagattcgctttccatgttgttggccggatcaccatctgaagagcagacggatggaaaaaggacctgatcattggggaagctggctttctggctgctggaggctggggagaaggtgttcattcacttgcatttctttgccctgggggctgtgatattaacagagggagggttcctgtggggggaagtccatgcctccctggcctgaagaagagactctttgcatatgactcacatgatgcatacctggtgggaggaaaagagttgggaacttcagatggacctagtacccactgagatttccacgccgaaggacagcgatgggaaaaatgcccttaaatcataggaaagtatttttttaagctaccaattgtgccgagaaaagcattttagcaatttatacaatatcatccagtaccttaagccctgattgtgtatattcatatattttggatacgcaccccccaactcccaatactggctctgtctgagtaagaaacagaatcctctggaacttgaggaagtgaacatttcggtgacttccgcatcaggaaggctagagttacccagagcatcaggccgccacaagtgcctgcttttaggagaccgaagtccgcagaacctgcctgtgtcccagcttggaggcctggtcctggaactgagccggggccctcactggcctcctccagggatgatcaacagggcagtgtggtctccgaatgtctggaagctgatggagctcagaattccactgtcaagaaagagcagtagaggggtgtggctgggcctgtcaccctggggccctccaggtaggcccgttttcacgtggagcatgggagccacgacccttcttaagacatgtatcactgtagagggaaggaacagaggccctgggcccttcctatcagaaggacatggtgaaggctgggaacgtgaggagaggcaatggccacggcccattttggctgtagcacatggcacgttggctgtgtggccttggcccacctgtgagtttaaagcaaggctttaaatgactttggagagggtcacaaatcctaaaagaagcattgaagtgaggtgtcatggattaattgacccctgtctatggaattacatgtaaaacattatcttgtcactgtagtttggttttatttgaaaacctgacaaaaaaaaagttccaggtgtggaatatgggggttatctgtacatcctggggcattaaaaaaaaaatcaatggtggggaactataaagaagtaacaaaagaagtgacatcttcagcaaataaactaggaaatttttttttcttccagtttagaatcagccttgaaacattgatggaataactctgtggcattattgcattatataccatttatctgtattaactttggaatgtactctgttcaatgtttaatgctgtggttgatatttcgaaagctgctttaaaaaaatacatgcatctcagcgtttttttgtttttaattgtatttagttatggcctatacactatttgtgagcaaaggtgatcgttttctgtttgagatttttatctcttgattcttcaaaagcattctgagaaggtgagataagccctgagtctcagctacctaagaaaaacctggatgtcactggccactgaggagctttgtttcaaccaagtcatgtgcatttccacgtcaacagaattgtttattgtgacagttatatctgttgtccctttgaccttgtttcttgaaggtttcctcgtccctgggcaattccgcatttaattcatggtattcaggattacatgcatgtttggttaaacccatgagattcattcagttaaaaatccagatggcaaatgaccagcagattcaaatctatggtggtttgacctttagagagttgctttacgtggcctgtttcaacacagacccacccagagccctcctgccctccttccgcgggggctttctcatggctgtccttcagggtcttcctgaaatgcagtggtgcttacgctccaccaagaaagcaggaaacctgtggtatgaagccagacctccccggcgggcctcagggaacagaatgatcagacctttgaatgattctaatttttaagcaaaatattattttatgaaaggtttacattgtcaaagtgatgaatatggaatatccaatcctgtgctgctatcctgccaaaatcattttaatggagtcagtttgcagtatgctccacgtggtaagatcctccaagctgctttagaagtaacaatgaagaacgtggacgtttttaatataaagcctgttttgtcttttgttgttgttcaaacgggattcacagagtatttgaaaaatgtatatatattaagaggtcacgggggctaattgctggctggctgccttttgctgtggggttttgttacctggttttaataacagtaaatgtgcccagcctcttggccccagaactgtacagtattgtggctgcacttgctctaagagtagttgatgttgcattttccttattgttaaaaacatgttagaagcaatgaatgtatataaaagcctcaactagtcatttttttctcctcttcttttttttcattatatctaattattttgcagttgggcaacagagaaccatccctattttgtattgaagagggattcacatctgcatcttaactgctctttatgaatgaaaaaacagtcctctgtatgtactcctctttacactggccagggtcagagttaaatagagtatatgcactttccaaattggggacaagggctctaaaaaaagccccaaaaggagaagaacatctgagaacctcctcggccctcccagtccctcgctgcacaaatactccgcaagagaggccagaatgacagctgacagggtctatggccatcgggtcgtctccgaagatttggcaggggcagaaaactctggcaggcttaagatttggaataaagtcacagaattaaggaagcacctcaatttagttcaaacaagacgccaacattctctccacagctcacttacctctctgtgttcagatgtggccttccatttatatgtgatctttgttttattagtaaatgcttatcatctaaagatgtagctctggcccagtgggaaaaattaggaagtgattataaatcgagaggagttataataatcaagattaaatgtaaataatcagggcaatcccaacacatgtctagctttcacctccaggatctattgagtgaacagaattgcaaatagtctctatttgtaattgaacttatcctaaaacaaatagtttataaatgtgaacttaaactctaattaattccaactgtacttttaaggcagtggctgtttttagactttcttatcacttatagttagtaatgtacacctactctatcagagaaaaacaggaaaggctcgaaatacaagccattctaaggaaattagggagtcagttgaaattctattctgatcttattctgtggtgtcttttgcagcccagacaaatgtggttacacactttttaagaaatacaattctacattgtcaagcttatgaaggttccaatcagatctttattgttattcaatttggatctttcagggattttttttttaaattattatgggacaaaggacatttgttggaggggtgggagggaggaagaatttttaaatgtaaaacattcccaagtttggatcagggagttggaagttttcagaataaccagaactaagggtatgaaggacctgtattggggtcgatgtgatgcctctgcgaagaaccttgtgtgacaaatgagaaacattttgaagtttgtggtacgacctttagattccagagacatcagcatggctcaaagtgcagctccgtttggcagtgcaatggtataaatttcaagctggatatgtctaatgggtatttaaacaataaatgtgcagttttaactaacaggatatttaatgacaaccttctggttggtagggacatctgtttctaaatgtttattatgtacaatacagaaaaaaattttataaaattaagcaatgtgaaactgaattggagagtgataatacaagtcctttagtcttacccagtgaatcattctgttccatgtctttggacaaccatgaccttggacaatcatgaaatatgcatctcactggatgcaaagaaaatcagatggagcatgaatggtactgtaccggttcatctggactgccccagaaaaataacttcaagcaaacatcctatcaacaacaaggttgttctgcataccaagctgagcacagaagatgggaacactggtggaggatggaaaggctcgctcaatcaagaaaattctgagactattaataaataagactgtagtgtagatactgagtaaatccatgcacctaaaccttttggaaaatctgccgtgggccctccagatagctcatttcattaagtttttccctccaaggtagaatttgcaagagtgacagtggattgcatttcttttggggaagctttcttttggtggttttgtttattataccttcttaagttttcaaccaaggtttgcttttgttttgagttactggggttatttttgttttaaataaaaataagtgtacaataagtgtttttgtattgaaagcttttgttatcaagattttcatacttttaccttccatggctctttttaagattgatacttttaagaggtggctgatattctgcaacactgtacacataaaaaatacggtaaggatactttacatggttaaggtaaagtaagtctccagttggccaccattagctataatggcactttgtttgtgttgttggaaaaagtcacattgccattaaactttccttgtctgtctagttaatattgtgaagaaaaataaagtacagtgtgagatactg

SEQ ID NO: 176 - DNA, 5183 bp, Homo sapiens
gcggaggcggctccggcgcccgctctgcccgccgctgggtccgaccgcgctcgccttccttgcagccgcgcctcggccccatggacgccctgtgcggttccggggagctcggctccaagttctgggactccaacctgtctgtgcacacagaaaacccggacctcactccctgcttccagaactccctgctggcctgggtgccctgcatctacctgtgggtcgccctgccctgctacttgctctacctgcggcaccattgtcgtggctacatcatcctctcccacctgtccaagctcaagatggtcctgggtgtcctgctgtggtgcgtctcctgggcggaccttttttactccttccatggcctggtccatggccgggcccctgcccctgttttctttgtcacccccttggtggtgggggtcaccatgctgctggccaccctgctgatacagtatgagcggctgcagggcgtacagtcttcgggggtcctcattatcttctggttcctgtgtgtggtctgcgccatcgtcccattccgctccaagatccttttagccaaggcagagggtgagatctcagaccccttccgcttcaccaccttctacatccactttgccctggtactctctgccctcatcttggcctgcttcagggagaaacctccatttttctccgcaaagaatgtcgaccctaacccctaccctgagaccagcgctggctttctctcccgcctgtttttctggtggttcacaaagatggccatctatggctaccggcatcccctggaggagaaggacctctggtccctaaaggaagaggacagatcccagatggtggtgcagcagctgctggaggcatggaggaagcaggaaaagcagacggcacgacacaaggcttcagcagcacctgggaaaaatgcctccggcgaggacgaggtgctgctgggtgcccggcccaggccccggaagccctccttcctgaaggccctgctggccaccttcggctccagcttcctcatcagtgcctgcttcaagcttatccaggacctgctctccttcatcaatccacagctgctcagcatcctgatcaggtttatctccaaccccatggccccctcctggtggggcttcctggtggctgggctgatgttcctgtgctccatgatgcagtcgctgatcttacaacactattaccactacatctttgtgactggggtgaagtttcgtactgggatcatgggtgtcatctacaggaaggctctggttatcaccaactcagtcaaacgtgcgtccactgtgggggaaattgtcaacctcatgtcagtggatgcccagcgcttcatggaccttgcccccttcctcaatctgctgtggtcagcacccctgcagatcatcctggcgatctacttcctctggcagaacctaggtccctctgtcctggctggagtcgctttcatggtcttgctgattccactcaacggagctgtggccgtgaagatgcgcgccttccaggtaaagcaaatgaaattgaaggactcgcgcatcaagctgatgagtgagatcctgaacggcatcaaggtgctgaagctgtacgcctgggagcccagcttcctgaagcaggtggagggcatcaggcagggtgagctccagctgctgcgcacggcggcctacctccacaccacaaccaccttcacctggatgtgcagccccttcctggtgaccctgatcaccctctgggtgtacgtgtacgtggacccaaacaatgtgctggacgccgagaaggcctttgtgtctgtgtccttgtttaatatcttaagacttcccctcaacatgctgccccagttaatcagcaacctgactcaggccagtgtgtctctgaaacggatccagcaattcctgagccaagaggaacttgacccccagagtgtggaaagaaagaccatctccccaggctatgccatcaccatacacagtggcaccttcacctgggcccaggacctgccccccactctgcacagcctagacatccaggtcccgaaaggggcactggtggccgtggtggggcctgtgggctgtgggaagtcctccctggtgtctgccctgctgggagagatggagaagctagaaggcaaagtgcacatgaagggctccgtggcctatgtgccccagcaggcatggatccagaactgcactcttcaggaaaacgtgcttttcggcaaagccctgaaccccaagcgctaccagcagactctggaggcctgtgccttgctagctgacctggagatgctgcctggtggggatcagacagagattggagagaagggcattaacctgtctgggggccagcggcagcgggtcagtctggctcgagctgtttacagtgatgccgatattttcttgctggatgacccactgtccgcggtggactctcatgtggccaagcacatctttgaccacgtcatcgggccagaaggcgtgctggcaggcaagacgcgagtgctggtgacgcacggcattagcttcctgccccagacagacttcatcattgtgctagctgatggacaggtgtctgagatgggcccgtacccagccctgctgcagcgcaacggctcctttgccaactttctctgcaactatgcccccgatgaggaccaagggcacctggaggacagctggaccgcgttggaaggtgcagaggataaggaggcactgctgattgaagacacactcagcaaccacacggatctgacagacaatgatccagtcacctatgtggtccagaagcagtttatgagacagctgagtgccctgtcctcagatggggagggacagggtcggcctgtaccccggaggcacctgggtccatcagagaaggtgcaggtgacagaggcgaaggcagatggggcactgacccaggaggagaaagcagccattggcactgtggagctcagtgtgttctgggattatgccaaggccgtggggctctgtaccacgctggccatctgtctcctgtatgtgggtcaaagtgcggctgccattggagccaatgtgtggctcagtgcctggacaaatgatgccatggcagacagtagacagaacaacacttccctgaggctgggcgtctatgctgctttaggaattctgcaagggttcttggtgatgctggcagccatggccatggcagcgggtggcatccaggctgcccgtgtgttgcaccaggcactgctgcacaacaagatacgctcgccacagtccttctttgacaccacaccatcaggccgcatcctgaactgcttctccaaggacatctatgtcgttgatgaggttctggcccctgtcatcctcatgctgctcaattccttcttcaacgccatctccactcttgtggtcatcatggccagcacgccgctcttcactgtggtcatcctgcccctggctgtgctctacaccttagtgcagcgcttctatgcagccacatcacggcaactgaagcggctggaatcagtcagccgctcacctatctactcccacttttcggagacagtgactggtgccagtgtcatccgggcctacaaccgcagccgggattttgagatcatcagtgatactaaggtggatgccaaccagagaagctgctacccctacatcatctccaaccggtggctgagcatcggagtggagttcgtggggaactgcgtggtgctctttgctgcactatttgccgtcatcgggaggagcagcctgaacccggggctggtgggcctttctgtgtcctactccttgcaggtgacatttgctctgaactggatgatacgaatgatgtcagatttggaatctaacatcgtggctgtggagagggtcaaggagtactccaagacagagacagaggcgccctgggtggtggaaggcagccgccctcccgaaggttggcccccacgtggggaggtggagttccggaattattctgtgcgctaccggccgggcctagacctggtgctgagagacctgagtctgcatgtgcacggtggcgagaaggtggggatcgtgggccgcactggggctggcaagtcttccatgaccctttgcctgttccgcatcctggaggcggcaaagggtgaaatccgcattgatggcctcaatgtggcagacatcggcctccatgacctgcgctctcagctgaccatcatcccgcaggaccccatcctgttctcggggaccctgcgcatgaacctggaccccttcggcagctactcagaggaggacatttggtgggctttggagctgtcccacctgcacacgtttgtgagctcccagccggcaggcctggacttccagtgctcagagggcggggagaatctcagcgtgggccagaggcagctcgtgtgcctggcccgagccctgctccgcaagagccgcatcctggttttagacgaggccacagctgccatcgacctggagactgacaacctcatccaggctaccatccgcacccagtttgatacctgcactgtcctgaccatcgcacaccggcttaacactatcatggactacaccagggtcctggtcctggacaaaggagtagtagctgaatttgattctccagccaacctcattgcagctagaggcatcttctacgggatggccagagatgctggacttgcctaaaatatattcctgagatttcctcctggcctttcctggttttcatcaggaaggaaatgacaccaaatatgtccgcagaatggacttgatagcaaacactgggggcaccttaagattttgcacctgtaaagtgccttacagggtaactgtgctgaatgctttagatgaggaaatgatccccaagtggtgaatgacacgcctaaggtcacagctagtttgagccagttagactagtccccggtctcccgattcccaactgagtgttatttgcacactgcactgttttcaaataacgattttatgaaatgacctctgtcctccctctgatttttcatattttctaaagtttcgtttctgttttttaataaaaagctttttcctcctggaacagaagacagctgctgggtcaggccacccctaggaactcagtcctgtactctggggtgctgcctgaatccattaaaaatgggagtactgatgaaataaaactacatggtcaacagtaaaaaaaaaaaaaaaaaa

SEQ ID NO: 177 - DNA, 4304 bp, Homo sapiens
cacacggactacaggggagttttgttgaagttgcaaagtcctggagcctccagagggctgtcggcgcagtagcagcgagcagcagagtccgcacgctccggcgaggggcagaagagcgcgagggagcgcggggcagcagaagcgagagccgagcgcggacccagccaggacccacagccctccccagctgcccaggaagagccccagccatggaacaccagctcctgtgctgcgaagtggaaaccatccgccgcgcgtaccccgatgccaacctcctcaacgaccgggtgctgcgggccatgctgaaggcggaggagacctgcgcgccctcggtgtcctacttcaaatgtgtgcagaaggaggtcctgccgtccatgcggaagatcgtcgccacctggatgctggaggtctgcgaggaacagaagtgcgaggaggaggtcttcccgctggccatgaactacctggaccgcttcctgtcgctggagcccgtgaaaaagagccgcctgcagctgctgggggccacttgcatgttcgtggcctctaagatgaaggagaccatccccctgacggccgagaagctgtgcatctacaccgacaactccatccggcccgaggagctgctgcaaatggagctgctcctggtgaacaagctcaagtggaacctggccgcaatgaccccgcacgatttcattgaacacttcctctccaaaatgccagaggcggaggagaacaaacagatcatccgcaaacacgcgcagaccttcgttgccctctgtgccacagatgtgaagttcatttccaatccgccctccatggtggcagcggggagcgtggtggccgcagtgcaaggcctgaacctgaggagccccaacaacttcctgtcctactaccgcctcacacgcttcctctccagagtgatcaagtgtgacccggactgcctccgggcctgccaggagcagatcgaagccctgctggagtcaagcctgcgccaggcccagcagaacatggaccccaaggccgccgaggaggaggaagaggaggaggaggaggtggacctggcttgcacacccaccgacgtgcgggacgtggacatctgagggcgccaggcaggcgggcgccaccgccacccgcagcgagggcggagccggccccaggtgctcccctgacagtccctcctctccggagcattttgataccagaagggaaagcttcattctccttgttgttggttgttttttcctttgctctttcccccttccatctctgacttaagcaaaagaaaaagattacccaaaaactgtctttaaaagagagagagagaaaaaaaaaatagtatttgcataaccctgagcggtgggggaggagggttgtgctacagatgatagaggattttataccccaataatcaactcgtttttatattaatgtacttgtttctctgttgtaagaataggcattaacacaaaggaggcgtctcgggagaggattaggttccatcctttacgtgtttaaaaaaaagcataaaaacattttaaaaacatagaaaaattcagcaaaccatttttaaagtagaagagggttttaggtagaaaaacatattcttgtgcttttcctgataaagcacagctgtagtggggttctaggcatctctgtactttgcttgctcatatgcatgtagtcactttataagtcattgtatgttattatattccgtaggtagatgtgtaacctcttcaccttattcatggctgaagtcacctcttggttacagtagcgtagcgtgcccgtgtgcatgtcctttgcgcctgtgaccaccaccccaacaaaccatccagtgacaaaccatccagtggaggtttgtcgggcaccagccagcgtagcagggtcgggaaaggccacctgtcccactcctacgatacgctactataaagagaagacgaaatagtgacataatatattctatttttatactcttcctatttttgtagtgacctgtttatgagatgctggttttctacccaacggccctgcagccagctcacgtccaggttcaacccacagctacttggtttgtgttcttcttcatattctaaaaccattccatttccaagcactttcagtccaataggtgtaggaaatagcgctgtttttgttgtgtgtgcagggagggcagttttctaatggaatggtttgggaatatccatgtacttgtttgcaagcaggactttgaggcaagtgtgggccactgtggtggcagtggaggtggggtgtttgggaggctgcgtgccagtcaagaagaaaaaggtttgcattctcacattgccaggatgataagttcctttccttttctttaaagaagttgaagtttaggaatcctttggtgccaactggtgtttgaaagtagggacctcagaggtttacctagagaacaggtggtttttaagggttatcttagatgtttcacaccggaaggtttttaaacactaaaatatataatttatagttaaggctaaaaagtatatttattgcagaggatgttcataaggccagtatgatttataaatgcaatctccccttgatttaaacacacagatacacacacacacacacacacacacaaaccttctgcctttgatgttacagatttaatacagtttatttttaaagatagatccttttataggtgagaaaaaaacaatctggaagaaaaaaaccacacaaagacattgattcagcctgtttggcgtttcccagagtcatctgattggacaggcatgggtgcaaggaaaattagggtactcaacctaagttcggttccgatgaattcttatcccctgccccttcctttaaaaaacttagtgacaaaatagacaatttgcacatcttggctatgtaattcttgtaatttttatttaggaagtgttgaagggaggtggcaagagtgtggaggctgacgtgtgagggaggacaggcgggaggaggtgtgaggaggaggctcccgaggggaaggggcggtgcccacaccggggacaggccgcagctccattttcttattgcgctgctaccgttgacttccaggcacggtttggaaatattcacatcgcttctgtgtatctctttcacattgtttgctgctattggaggatcagttttttgttttacaatgtcatatactgccatgtactagttttagttttctcttagaacattgtattacagatgccttttttgtagttttttttttttttatgtgatcaattttgacttaatgtgattactgctctattccaaaaaggttgctgtttcacaatacctcatgcttcacttagccatggtggacccagcgggcaggttctgcctgctttggcgggcagacacgcgggcgcgatcccacacaggctggcgggggccggccccgaggccgcgtgcgtgagaaccgcgccggtgtccccagagaccaggctgtgtccctcttctcttccctgcgcctgtgatgctgggcacttcatctgatcgggggcgtagcatcatagtagtttttacagctgtgttattctttgcgtgtagctatggaagttgcataattattattattattattataacaagtgtgtcttacgtgccaccacggcgttgtacctgtaggactctcattcgggatgattggaatagcttctggaatttgttcaagttttgggtatgtttaatctgttatgtactagtgttctgtttgttattgttttgttaattacaccataatgctaatttaaagagactccaaatctcaatgaagccagctcacagtgctgtgtgccccggtcacctagcaagctgccgaaccaaaagaatttgcaccccgctgcgggcccacgtggttggggccctgccctggcagggtcatcctgtgctcggaggccatctcgggcacaggcccaccccgccccacccctccagaacacggctcacgcttacctcaaccatcctggctgcggcgtctgtctgaaccacgcgggggccttgagggacgctttgtctgtcgtgatggggcaagggcacaagtcctggatgttgtgtgtatcgagaggccaaaggctggtggcaagtgcacggggcacagcggagtctgtcctgtgacgcgcaagtctgagggtctgggcggcgggcggctgggtctgtgcatttctggttgcaccgcggcgcttcccagcaccaacatgtaaccggcatgtttccagcagaagacaaaaagacaaacatgaaagtctagaaataaaactggtaaaaccccaaaaaaaaaaaaaaaa

SEQ ID NO: 178 - DNA, 2021 bp, Homo sapiens
agcagccggcgcggccgccagcgcggtgtagggggcaggcgcggatcccgccaccgccgcgcgctcggcccgccgactcccggcgccgccgccgccactgccgtcgccgccgccgcctgccgggactggagcgcgccgtccgccgcggacaagaccctggcctcaggccggagcagccccatcatgccgagggagcgcagggagcgggatgcgaaggagcgggacaccatgaaggaggacggcggcgcggagttctcggctcgctccaggaagaggaaggcaaacgtgaccgtttttttgcaggatccagatgaagaaatggccaaaatcgacaggacggcgagggaccagtgtgggagccagccttgggacaataatgcagtctgtgcagacccctgctccctgatccccacacctgacaaagaagatgatgaccgggtttacccaaactcaacgtgcaagcctcggattattgcaccatccagaggctccccgctgcctgtactgagctgggcaaatagagaggaagtctggaaaatcatgttaaacaaggaaaagacatacttaagggatcagcactttcttgagcaacaccctcttctgcagccaaaaatgcgagcaattcttctggattggttaatggaggtgtgtgaagtctataaacttcacagggagaccttttacttggcacaagatttctttgaccggtatatggcgacacaagaaaatgttgtaaaaactcttttacagcttattgggatttcatctttatttattgcagccaaacttgaggaaatctatcctccaaagttgcaccagtttgcgtatgtgacagatggagcttgttcaggagatgaaattctcaccatggaattaatgattatgaaggcccttaagtggcgtttaagtcccctgactattgtgtcctggctgaatgtatacatgcaggttgcatatctaaatgacttacatgaagtgctactgccgcagtatccccagcaaatctttatacagattgcagagctgttggatctctgtgtcctggatgttgactgccttgaatttccttatggtatacttgctgcttcggccttgtatcatttctcgtcatctgaattgatgcaaaaggtttcagggtatcagtggtgcgacatagagaactgtgtcaagtggatggttccatttgccatggttataagggagacggggagctcaaaactgaagcacttcaggggcgtcgctgatgaagatgcacacaacatacagacccacagagacagcttggatttgctggacaaagcccgagcaaagaaagccatgttgtctgaacaaaatagggcttctcctctccccagtgggctcctcaccccgccacagagcggtaagaagcagagcagcgggccggaaatggcgtgaccaccccatccttctccaccaaagacagttgcgcgcctgctccacgttctcttctgtctgttgcagcggaggcgtgcgtttgcttttacagatatctgaatggaagagtgtttcttccacaacagaagtatttctgtggatggcatcaaacagggcaaagtgttttttattgaatgcttataggttttttttaaataagtgggtcaagtacaccagccacctccagacaccagtgcgtgctcccgatgctgctatggaaggtgctacttgacctaagggactcccacaacaacaaaagcttgaagctgtggagggccacggtggcgtggctctcctcgcaggtgttctgggctccgttgtaccaagtggagcaggtggttgcgggcaagcgttgtgcagagcccatagccagctgggcagggggctgccctctccacattatcagttgacagtgtacaatgcctttgatgaactgttttgtaagtgctgctatatctatccattttttaataaagataatactgtttttgaaaaaaaaaaaaaaaaaaaaaaaaaaaaaaaaaaaaaaaaaaaaaaaaaaaaaaaaaaaaaaaaaaaaaaaaaaa

SEQ ID NO: 179 - DNA, 4815 bp, Homo sapiens
agtggcgtcggaactgcaaagcacctgtgagcttgcggaagtcagttcagactccagcccgctccagcccggcccgacccgaccgcacccggcgcctgccctcgctcggcgtccccggccagccatgggcccttggagccgcagcctctcggcgctgctgctgctgctgcaggtctcctcttggctctgccaggagccggagccctgccaccctggctttgacgccgagagctacacgttcacggtgccccggcgccacctggagagaggccgcgtcctgggcagagtgaattttgaagattgcaccggtcgacaaaggacagcctatttttccctcgacacccgattcaaagtgggcacagatggtgtgattacagtcaaaaggcctctacggtttcataacccacagatccatttcttggtctacgcctgggactccacctacagaaagttttccaccaaagtcacgctgaatacagtggggcaccaccaccgccccccgccccatcaggcctccgtttctggaatccaagcagaattgctcacatttcccaactcctctcctggcctcagaagacagaagagagactgggttattcctcccatcagctgcccagaaaatgaaaaaggcccatttcctaaaaacctggttcagatcaaatccaacaaagacaaagaaggcaaggttttctacagcatcactggccaaggagctgacacaccccctgttggtgtctttattattgaaagagaaacaggatggctgaaggtgacagagcctctggatagagaacgcattgccacatacactctcttctctcacgctgtgtcatccaacgggaatgcagttgaggatccaatggagattttgatcacggtaaccgatcagaatgacaacaagcccgaattcacccaggaggtctttaaggggtctgtcatggaaggtgctcttccaggaacctctgtgatggaggtcacagccacagacgcggacgatgatgtgaacacctacaatgccgccatcgcttacaccatcctcagccaagatcctgagctccctgacaaaaatatgttcaccattaacaggaacacaggagtcatcagtgtggtcaccactgggctggaccgagagagtttccctacgtataccctggtggttcaagctgctgaccttcaaggtgaggggttaagcacaacagcaacagctgtgatcacagtcactgacaccaacgataatcctccgatcttcaatcccaccacgtacaagggtcaggtgcctgagaacgaggctaacgtcgtaatcaccacactgaaagtgactgatgctgatgcccccaataccccagcgtgggaggctgtatacaccatattgaatgatgatggtggacaatttgtcgtcaccacaaatccagtgaacaacgatggcattttgaaaacagcaaagggcttggattttgaggccaagcagcagtacattctacacgtagcagtgacgaatgtggtaccttttgaggtctctctcaccacctccacagccaccgtcaccgtggatgtgctggatgtgaatgaagcccccatctttgtgcctcctgaaaagagagtggaagtgtccgaggactttggcgtgggccaggaaatcacatcctacactgcccaggagccagacacatttatggaacagaaaataacatatcggatttggagagacactgccaactggctggagattaatccggacactggtgccatttccactcgggctgagctggacagggaggattttgagcacgtgaagaacagcacgtacacagccctaatcatagctacagacaatggttctccagttgctactggaacagggacacttctgctgatcctgtctgatgtgaatgacaacgcccccataccagaacctcgaactatattcttctgtgagaggaatccaaagcctcaggtcataaacatcattgatgcagaccttcctcccaatacatctcccttcacagcagaactaacacacggggcgagtgccaactggaccattcagtacaacgacccaacccaagaatctatcattttgaagccaaagatggccttagaggtgggtgactacaaaatcaatctcaagctcatggataaccagaataaagaccaagtgaccaccttagaggtcagcgtgtgtgactgtgaaggggccgctggcgtctgtaggaaggcacagcctgtcgaagcaggattgcaaattcctgccattctggggattcttggaggaattcttgctttgctaattctgattctgctgctcttgctgtttcttcggaggagagcggtggtcaaagagcccttactgcccccagaggatgacacccgggacaacgtttattactatgatgaagaaggaggcggagaagaggaccaggactttgacttgagccagctgcacaggggcctggacgctcggcctgaagtgactcgtaacgacgttgcaccaaccctcatgagtgtcccccggtatcttccccgccctgccaatcccgatgaaattggaaattttattgatgaaaatctgaaagcggctgatactgaccccacagccccgccttatgattctctgctcgtgtttgactatgaaggaagcggttccgaagctgctagtctgagctccctgaactcctcagagtcagacaaagaccaggactatgactacttgaacgaatggggcaatcgcttcaagaagctggctgacatgtacggaggcggcgaggacgactaggggactcgagagaggcgggccccagacccatgtgctgggaaatgcagaaatcacgttgctggtggtttttcagctcccttcccttgagatgagtttctggggaaaaaaaagagactggttagtgatgcagttagtatagctttatactctctccactttatagctctaataagtttgtgttagaaaagtttcgacttatttcttaaagcttttttttttttcccatcactctttacatggtggtgatgtccaaaagatacccaaattttaatattccagaagaacaactttagcatcagaaggttcacccagcaccttgcagattttcttaaggaattttgtctcacttttaaaaagaaggggagaagtcagctactctagttctgttgttttgtgtatataattttttaaaaaaaatttgtgtgcttctgctcattactacactggtgtgtccctctgccttttttttttttttaagacagggtctcattctatcggccaggctggagtgcagtggtgcaatcacagctcactgcagccttgtcctcccaggctcaagctatccttgcacctcagcctcccaagtagctgggaccacaggcatgcaccactacgcatgactaattttttaaatatttgagacggggtctccctgtgttacccaggctggtctcaaactcctgggctcaagtgatcctcccatcttggcctcccagagtattgggattacagacatgagccactgcacctgcccagctccccaactccctgccattttttaagagacagtttcgctccatcgcccaggcctgggatgcagtgatgtgatcatagctcactgtaacctcaaactctggggctcaagcagttctcccaccagcctcctttttatttttttgtacagatggggtcttgctatgttgcccaagctggtcttaaactcctggcctcaagcaatccttctgccttggccccccaaagtgctgggattgtgggcatgagctgctgtgcccagcctccatgttttaatatcaactctcactcctgaattcagttgctttgcccaagataggagttctctgatgcagaaattattgggctcttttagggtaagaagtttgtgtctttgtctggccacatcttgactaggtattgtctactctgaagacctttaatggcttccctctttcatctcctgagtatgtaacttgcaatgggcagctatccagtgacttgttctgagtaagtgtgttcattaatgtttatttagctctgaagcaagagtgatatactccaggacttagaatagtgcctaaagtgctgcagccaaagacagagcggaactatgaaaagtgggcttggagatggcaggagagcttgtcattgagcctggcaatttagcaaactgatgctgaggatgattgaggtgggtctacctcatctctgaaaattctggaaggaatggaggagtctcaacatgtgtttctgacacaagatccgtggtttgtactcaaagcccagaatccccaagtgcctgcttttgatgatgtctacagaaaatgctggctgagctgaacacatttgcccaattccaggtgtgcacagaaaaccgagaatattcaaaattccaaatttttttcttaggagcaagaagaaaatgtggccctaaagggggttagttgaggggtagggggtagtgaggatcttgatttggatctctttttatttaaatgtgaatttcaacttttgacaatcaaagaaaagacttttgttgaaatagctttactgtttctcaagtgttttggagaaaaaaatcaaccctgcaatcactttttggaattgtcttgatttttcggcagttcaagctatatcgaatatagttctgtgtagagaatgtcactgtagttttgagtgtatacatgtgtgggtgctgataattgtgtattttctttgggggtggaaaaggaaaacaattcaagctgagaaaagtattctcaaagatgcatttttataaattttattaaacaattttgttaaaccat

SEQ ID NO: 180 - DNA, 5616 bp, Homo sapiens
ccccggcgcagcgcggccgcagcagcctccgccccccgcacggtgtgagcgcccgacgcggccgaggcggccggagtcccgagctagccccggcggccgccgccgcccagaccggacgacaggccacctcgtcggcgtccgcccgagtccccgcctcgccgccaacgccacaaccaccgcgcacggccccctgactccgtccagtattgatcgggagagccggagcgagctcttcggggagcagcgatgcgaccctccgggacggccggggcagcgctcctggcgctgctggctgcgctctgcccggcgagtcgggctctggaggaaaagaaagtttgccaaggcacgagtaacaagctcacgcagttgggcacttttgaagatcattttctcagcctccagaggatgttcaataactgtgaggtggtccttgggaatttggaaattacctatgtgcagaggaattatgatctttccttcttaaagaccatccaggaggtggctggttatgtcctcattgccctcaacacagtggagcgaattcctttggaaaacctgcagatcatcagaggaaatatgtactacgaaaattcctatgccttagcagtcttatctaactatgatgcaaataaaaccggactgaaggagctgcccatgagaaatttacaggaaatcctgcatggcgccgtgcggttcagcaacaaccctgccctgtgcaacgtggagagcatccagtggcgggacatagtcagcagtgactttctcagcaacatgtcgatggacttccagaaccacctgggcagctgccaaaagtgtgatccaagctgtcccaatgggagctgctggggtgcaggagaggagaactgccagaaactgaccaaaatcatctgtgcccagcagtgctccgggcgctgccgtggcaagtcccccagtgactgctgccacaaccagtgtgctgcaggctgcacaggcccccgggagagcgactgcctggtctgccgcaaattccgagacgaagccacgtgcaaggacacctgccccccactcatgctctacaaccccaccacgtaccagatggatgtgaaccccgagggcaaatacagctttggtgccacctgcgtgaagaagtgtccccgtaattatgtggtgacagatcacggctcgtgcgtccgagcctgtggggccgacagctatgagatggaggaagacggcgtccgcaagtgtaagaagtgcgaagggccttgccgcaaagtgtgtaacggaataggtattggtgaatttaaagactcactctccataaatgctacgaatattaaacacttcaaaaactgcacctccatcagtggcgatctccacatcctgccggtggcatttaggggtgactccttcacacatactcctcctctggatccacaggaactggatattctgaaaaccgtaaaggaaatcacagggtttttgctgattcaggcttggcctgaaaacaggacggacctccatgcctttgagaacctagaaatcatacgcggcaggaccaagcaacatggtcagttttctcttgcagtcgtcagcctgaacataacatccttgggattacgctccctcaaggagataagtgatggagatgtgataatttcaggaaacaaaaatttgtgctatgcaaatacaataaactggaaaaaactgtttgggacctccggtcagaaaaccaaaattataagcaacagaggtgaaaacagctgcaaggccacaggccaggtctgccatgccttgtgctcccccgagggctgctggggcccggagcccagggactgcgtctcttgccggaatgtcagccgaggcagggaatgcgtggacaagtgcaaccttctggagggtgagccaagggagtttgtggagaactctgagtgcatacagtgccacccagagtgcctgcctcaggccatgaacatcacctgcacaggacggggaccagacaactgtatccagtgtgcccactacattgacggcccccactgcgtcaagacctgcccggcaggagtcatgggagaaaacaacaccctggtctggaagtacgcagacgccggccatgtgtgccacctgtgccatccaaactgcacctacggatgcactgggccaggtcttgaaggctgtccaacgaatgggcctaagatcccgtccatcgccactgggatggtgggggccctcctcttgctgctggtggtggccctggggatcggcctcttcatgcgaaggcgccacatcgttcggaagcgcacgctgcggaggctgctgcaggagagggagcttgtggagcctcttacacccagtggagaagctcccaaccaagctctcttgaggatcttgaaggaaactgaattcaaaaagatcaaagtgctgggctccggtgcgttcggcacggtgtataagggactctggatcccagaaggtgagaaagttaaaattcccgtcgctatcaaggaattaagagaagcaacatctccgaaagccaacaaggaaatcctcgatgaagcctacgtgatggccagcgtggacaacccccacgtgtgccgcctgctgggcatctgcctcacctccaccgtgcagctcatcacgcagctcatgcccttcggctgcctcctggactatgtccgggaacacaaagacaatattggctcccagtacctgctcaactggtgtgtgcagatcgcaaagggcatgaactacttggaggaccgtcgcttggtgcaccgcgacctggcagccaggaacgtactggtgaaaacaccgcagcatgtcaagatcacagattttgggctggccaaactgctgggtgcggaagagaaagaataccatgcagaaggaggcaaagtgcctatcaagtggatggcattggaatcaattttacacagaatctatacccaccagagtgatgtctggagctacggggtgaccgtttgggagttgatgacctttggatccaagccatatgacggaatccctgccagcgagatctcctccatcctggagaaaggagaacgcctccctcagccacccatatgtaccatcgatgtctacatgatcatggtcaagtgctggatgatagacgcagatagtcgcccaaagttccgtgagttgatcatcgaattctccaaaatggcccgagacccccagcgctaccttgtcattcagggggatgaaagaatgcatttgccaagtcctacagactccaacttctaccgtgccctgatggatgaagaagacatggacgacgtggtggatgccgacgagtacctcatcccacagcagggcttcttcagcagcccctccacgtcacggactcccctcctgagctctctgagtgcaaccagcaacaattccaccgtggcttgcattgatagaaatgggctgcaaagctgtcccatcaaggaagacagcttcttgcagcgatacagctcagaccccacaggcgccttgactgaggacagcatagacgacaccttcctcccagtgcctgaatacataaaccagtccgttcccaaaaggcccgctggctctgtgcagaatcctgtctatcacaatcagcctctgaaccccgcgcccagcagagacccacactaccaggacccccacagcactgcagtgggcaaccccgagtatctcaacactgtccagcccacctgtgtcaacagcacattcgacagccctgcccactgggcccagaaaggcagccaccaaattagcctggacaaccctgactaccagcaggacttctttcccaaggaagccaagccaaatggcatctttaagggctccacagctgaaaatgcagaatacctaagggtcgcgccacaaagcagtgaatttattggagcatgaccacggaggatagtatgagccctaaaaatccagactctttcgatacccaggaccaagccacagcaggtcctccatcccaacagccatgcccgcattagctcttagacccacagactggttttgcaacgtttacaccgactagccaggaagtacttccacctcgggcacattttgggaagttgcattcctttgtcttcaaactgtgaagcatttacagaaacgcatccagcaagaatattgtccctttgagcagaaatttatctttcaaagaggtatatttgaaaaaaaaaaaaagtatatgtgaggatttttattgattggggatcttggagtttttcattgtcgctattgatttttacttcaatgggctcttccaacaaggaagaagcttgctggtagcacttgctaccctgagttcatccaggcccaactgtgagcaaggagcacaagccacaagtcttccagaggatgcttgattccagtggttctgcttcaaggcttccactgcaaaacactaaagatccaagaaggccttcatggccccagcaggccggatcggtactgtatcaagtcatggcaggtacagtaggataagccactctgtcccttcctgggcaaagaagaaacggaggggatggaattcttccttagacttacttttgtaaaaatgtccccacggtacttactccccactgatggaccagtggtttccagtcatgagcgttagactgacttgtttgtcttccattccattgttttgaaactcagtatgctgcccctgtcttgctgtcatgaaatcagcaagagaggatgacacatcaaataataactcggattccagcccacattggattcatcagcatttggaccaatagcccacagctgagaatgtggaatacctaaggatagcaccgcttttgttctcgcaaaaacgtatctcctaatttgaggctcagatgaaatgcatcaggtcctttggggcatagatcagaagactacaaaaatgaagctgctctgaaatctcctttagccatcaccccaaccccccaaaattagtttgtgttacttatggaagatagttttctccttttacttcacttcaaaagctttttactcaaagagtatatgttccctccaggtcagctgcccccaaaccccctccttacgctttgtcacacaaaaagtgtctctgccttgagtcatctattcaagcacttacagctctggccacaacagggcattttacaggtgcgaatgacagtagcattatgagtagtgtggaattcaggtagtaaatatgaaactagggtttgaaattgataatgctttcacaacatttgcagatgttttagaaggaaaaaagttccttcctaaaataatttctctacaattggaagattggaagattcagctagttaggagcccaccttttttcctaatctgtgtgtgccctgtaacctgactggttaacagcagtcctttgtaaacagtgttttaaactctcctagtcaatatccaccccatccaatttatcaaggaagaaatggttcagaaaatattttcagcctacagttatgttcagtcacacacacatacaaaatgttccttttgcttttaaagtaatttttgactcccagatcagtcagagcccctacagcattgttaagaaagtatttgatttttgtctcaatgaaaataaaactatattcatttccactctaaaaaaaaaaaaaaaaa

SEQ ID NO: 181 - DNA, 2331 bp, Homo sapiens
cgcctccagcctctcacactctcctaagccctctcatctcctggaaccatggccagcacatccaccaccatcaggagccacagcagcagccgccggggtttcagtgccaactcagccaggctccctggggtcagccgctctggcttcagcagcatctccgtgtcccgctccaggggcagtggtggcctgggtggcgcatgtggaggagctggctttggcagccgcagtctgtatggcctggggggctccaagaggatctccattggagggggcagctgtgccatcagtggcggctatggcagcagagccggaggcagctatggctttggtggcgccgggagtggatttggtttcggtggtggagccggcattggctttggtctgggtggtggagccggccttgctggtggctttgggggccctggcttccctgtgtgcccccctggaggcatccaagaggtcactgtcaaccagagtctcctgactcccctcaacctgcaaattgaccccgccatccagcgggtgcgggccgaggagcgtgagcagatcaagaccctcaacaacaagtttgcctccttcatcgacaaggtgcggttcctagagcagcagaacaaggttctggacaccaagtggaccctgctgcaggagcagggcaccaagactgtgaggcagaacctggagccgttgttcgagcagtacatcaacaacctcaggaggcagctggacaacatcgtgggggaacggggtcgtctggactcggagctgagaaacatgcaggacctggtggaggacctcaagaacaaatatgaggatgaaatcaacaagcgcacagcagcagagaatgaatttgtgactctgaagaaggatgtggatgctgcctacatgaacaaggttgaactgcaagccaaggcagacactcttacagatgagatcaacttcctgagagccttgtatgatgcagagctgtcccagatgcagacccacatctcagacacatccgtggtgctatccatggacaacaaccgcaacctggacctggacagcatcatcgctgaggtcaaggcccaatatgaggagattgctcagaggagcagggctgaggctgagtcctggtaccagacaaagtacgaggagctgcagatcacagcaggcagacatggggacgacctgcgcaacaccaagcaggagattgctgagatcaaccgcatgatccagaggctgagatctgagatcgaccacgtcaagaagcagtgtgccaacctacaggccgccattgctgatgctgagcagcgtggggagatggccctcaaggatgctaagaacaagctggaagggctggaggatgccctgcagaaggccaagcaggacctggcccggctgctgaaggagtaccaggagctgatgaacgtcaagctggccctggatgtggagatcgccacctaccgcaagctgctggagggcgaggagtgcaggctgaatggcgaaggcgttggacaagtcaacatctctgtagtgcagtccaccgtctccagtggctatggcggtgccagcggtgtcggcagtggcttaggcctgggtggaggaagcagctactcctatggcagtggtcttggcgttggaggcggctttagttccagcagcggcagagccactgggggtggcctcagctctgttggaggcggcagttccaccatcaagtacaccaccacctcctcctccagcaggaagagctacaagcactgaagtgctgccgccagctctcagtcccacagctctcaggcccctctctggcagcagagccctctcctcaggttgcttgtcctcccctggcctccagtctcccctgccctcccgggtagagctgggatgccctcacttttcttctcatcaatacctgttccactgagctcctgttgcttaccatcaagtcaacagttatcagcactcagacatgcgaatgtcctttttagttcccgtattattacaggtatctgagtctgccataattctgagaagaaaatgacctatatccccataagaactgaaactcagtctaggtccagctgcagatgaggagtcctctctttaattgctaaccatcctgcccattatagctacactcaggagttctcatctgacaagtcagttgtcctgatcttctcttgcagtgtccctgaatggcaagtgatgtaccttctgatgcagtctgcattcctgcactgctttctctgctctctttgccttcttttgttctgttgaataaagcatattgagaatgtgaaaaaaaaaaaaaaaaaaaaaaaaaaaaaaaaaaaaaaaaaaaaaaaaaaa

SEQ ID NO: 182 - DNA, 2379 bp, Homo sapiens
gacccccgagctgtgctgctcgcggccgccaccgccgggccccggccgtccctggctcccctcctgcctcgagaagggcagggcttctcagaggcttggcgggaaaaagaacggagggagggatcgcgctgagtataaaagccggttttcggggctttatctaactcgctgtagtaattccagcgagaggcagagggagcgagcgggcggccggctagggtggaagagccgggcgagcagagctgcgctgcgggcgtcctgggaagggagatccggagcgaatagggggcttcgcctctggcccagccctcccgctgatcccccagccagcggtccgcaacccttgccgcatccacgaaactttgcccatagcagcgggcgggcactttgcactggaacttacaacacccgagcaaggacgcgactctcccgacgcggggaggctattctgcccatttggggacacttccccgccgctgccaggacccgcttctctgaaaggctctccttgcagctgcttagacgctggatttttttcgggtagtggaaaaccagcagcctcccgcgacgatgcccctcaacgttagcttcaccaacaggaactatgacctcgactacgactcggtgcagccgtatttctactgcgacgaggaggagaacttctaccagcagcagcagcagagcgagctgcagcccccggcgcccagcgaggatatctggaagaaattcgagctgctgcccaccccgcccctgtcccctagccgccgctccgggctctgctcgccctcctacgttgcggtcacacccttctcccttcggggagacaacgacggcggtggcgggagcttctccacggccgaccagctggagatggtgaccgagctgctgggaggagacatggtgaaccagagtttcatctgcgacccggacgacgagaccttcatcaaaaacatcatcatccaggactgtatgtggagcggcttctcggccgccgccaagctcgtctcagagaagctggcctcctaccaggctgcgcgcaaagacagcggcagcccgaaccccgcccgcggccacagcgtctgctccacctccagcttgtacctgcaggatctgagcgccgccgcctcagagtgcatcgacccctcggtggtcttcccctaccctctcaacgacagcagctcgcccaagtcctgcgcctcgcaagactccagcgccttctctccgtcctcggattctctgctctcctcgacggagtcctccccgcagggcagccccgagcccctggtgctccatgaggagacaccgcccaccaccagcagcgactctgaggaggaacaagaagatgaggaagaaatcgatgttgtttctgtggaaaagaggcaggctcctggcaaaaggtcagagtctggatcaccttctgctggaggccacagcaaacctcctcacagcccactggtcctcaagaggtgccacgtctccacacatcagcacaactacgcagcgcctccctccactcggaaggactatcctgctgccaagagggtcaagttggacagtgtcagagtcctgagacagatcagcaacaaccgaaaatgcaccagccccaggtcctcggacaccgaggagaatgtcaagaggcgaacacacaacgtcttggagcgccagaggaggaacgagctaaaacggagcttttttgccctgcgtgaccagatcccggagttggaaaacaatgaaaaggcccccaaggtagttatccttaaaaaagccacagcatacatcctgtccgtccaagcagaggagcaaaagctcatttctgaagaggacttgttgcggaaacgacgagaacagttgaaacacaaacttgaacagctacggaactcttgtgcgtaaggaaaagtaaggaaaacgattccttctaacagaaatgtcctgagcaatcacctatgaacttgtttcaaatgcatgatcaaatgcaacctcacaaccttggctgagtcttgagactgaaagatttagccataatgtaaactgcctcaaattggactttgggcataaaagaacttttttatgcttaccatcttttttttttctttaacagatttgtatttaagaattgtttttaaaaaattttaagatttacacaatgtttctctgtaaatattgccattaaatgtaaataactttaataaaacgtttatagcagttacacagaatttcaatcctagtatatagtacctagtattataggtactataaaccctaattttttttatttaagtacattttgctttttaaagttgatttttttctattgtttttagaaaaaataaaataactggcaaatatatcattgagccaaatcttaaaaaaaaaaaaaaa

SEQ ID NO: 183 - DNA, 2320 bp, Homo sapiens
tcgacagctctctcgcccagcccagttctggaagggataaaaagggggcatcaccgttcctgggtaacagagccaccttctgcgtcctgctgagctctgttctctccagcacctcccaacccactagtgcctggttctcttgctccaccaggaacaagccaccatgtctcgccagtcaagtgtgtccttccggagcgggggcagtcgtagcttcagcaccgcctctgccatcaccccgtctgtctcccgcaccagcttcacctccgtgtcccggtccgggggtggcggtggtggtggcttcggcagggtcagccttgcgggtgcttgtggagtgggtggctatggcagccggagcctctacaacctggggggctccaagaggatatccatcagcactagtggtggcagcttcaggaaccggtttggtgctggtgctggaggcggctatggctttggaggtggtgccggtagtggatttggtttcggcggtggagctggtggtggctttgggctcggtggcggagctggctttggaggtggcttcggtggccctggctttcctgtctgccctcctggaggtatccaagaggtcactgtcaaccagagtctcctgactcccctcaacctgcaaatcgaccccagcatccagagggtgaggaccgaggagcgcgagcagatcaagaccctcaacaataagtttgcctccttcatcgacaaggtgcggttcctggagcagcagaacaaggttctggacaccaagtggaccctgctgcaggagcagggcaccaagactgtgaggcagaacctggagccgttgttcgagcagtacatcaacaacctcaggaggcagctggacagcatcgtgggggaacggggccgcctggactcagagctgagaaacatgcaggacctggtggaagacttcaagaacaagtatgaggatgaaatcaacaagcgtaccactgctgagaatgagtttgtgatgctgaagaaggatgtagatgctgcctacatgaacaaggtggagctggaggccaaggttgatgcactgatggatgagattaacttcatgaagatgttctttgatgcggagctgtcccagatgcagacgcatgtctctgacacctcagtggtcctctccatggacaacaaccgcaacctggacctggatagcatcatcgctgaggtcaaggcccagtatgaggagattgccaaccgcagccggacagaagccgagtcctggtatcagaccaagtatgaggagctgcagcagacagctggccggcatggcgatgacctccgcaacaccaagcatgagatctctgagatgaaccggatgatccagaggctgagagccgagattgacaatgtcaagaaacagtgcgccaatctgcagaacgccattgcggatgccgagcagcgtggggagctggccctcaaggatgccaggaacaagctggccgagctggaggaggccctgcagaaggccaagcaggacatggcccggctgctgcgtgagtaccaggagctcatgaacaccaagctggccctggacgtggagatcgccacttaccgcaagctgctggagggcgaggaatgcagactcagtggagaaggagttggaccagtcaacatctctgttgtcacaagcagtgtttcctctggatatggcagtggcagtggctatggcggtggcctcggtggaggtcttggcggcggcctcggtggaggtcttgccggaggtagcagtggaagctactactccagcagcagtgggggtgtcggcctaggtggtgggctcagtgtggggggctctggcttcagtgcaagcagtggccgagggctgggggtgggctttggcagtggcgggggtagcagctccagcgtcaaatttgtctccaccacctcctcctcccggaagagcttcaagagctaagaacctgctgcaagtcactgccttccaagtgcagcaacccagcccatggagattgcctcttctaggcagttgctcaagccatgttttatccttttctggagagtagtctagaccaagccaattgcagaaccacattctttggttcccaggagagccccattcccagcccctggtctcccgtgccgcagttctatattctgcttcaaatcagccttcaggtttcccacagcatggcccctgctgacacgagaacccaaagttttcccaaatctaaatcatcaaaacagaatccccaccccaatcccaaattttgttttggttctaactacctccagaatgtgttcaataaaatgcttttataatataaaaaaaaaaaaaaaaaaa

SEQ ID NO: 184 - DNA, 986 bp, Homo sapiens
tgggaaagagggaaaggcttccccggccagctgcgcggcgactccggggactccagggcgcccctctgcggccgacgcccggggtgcagcggccgccggggctggggccggcgggagtccgcgggaccctccagaagagcggccggcgccgtgactcagcactggggcggagcggggcgggaccacccttataaggctcggaggccgcgaggccttcgctggagtttcgccgccgcagtcttcgccaccatgccgccctacaccgtggtctatttcccagttcgaggccgctgcgcggccctgcgcatgctgctggcagatcagggccagagctggaaggaggaggtggtgaccgtggagacgtggcaggagggctcactcaaagcctcctgcctatacgggcagctccccaagttccaggacggagacctcaccctgtaccagtccaataccatcctgcgtcacctgggccgcacccttgggctctatgggaaggaccagcaggaggcagccctggtggacatggtgaatgacggcgtggaggacctccgctgcaaatacatctccctcatctacaccaactatgaggcgggcaaggatgactatgtgaaggcactgcccgggcaactgaagccttttgagaccctgctgtcccagaaccagggaggcaagaccttcattgtgggagaccagatctccttcgctgactacaacctgctggacttgctgctgatccatgaggtcctagcccctggctgcctggatgcgttccccctgctctcagcatatgtggggcgcctcagtgcccggcccaagctcaaggccttcctggcctcccctgagtacgtgaacctccccatcaatggcaacgggaaacagtgagggttggggggactctgagcgggaggcagagtttgccttcctttctccaggaccaataaaatttctaagagagctaaaaaaaaaaaaaaaaaaaaaaaaaaaaa

SEQ ID NO: 185 - DNA, 4131 bp, Homo sapiens
atcccgcccgcatacagcccgcatcccgccggggaagcgagcccagtccagcgctgcccgtccagtcctcgcccaagatttaaagcccgcaagttttgttcttgagaccagcgactttagctccgatgcgggaaggaaagccgacctccgatttggacatttaaagagctgggcttgaacttcgtgagtttcgctctaaactgcccttgaaatgaagctggacttggaggtggcatggaatattcacatgggagagccgcatgaggccgcccaccacgcttcctgaaggatgcccgtgtggaagaattttgacgtgccagtgtcctcgttctacagggtgttccattcttccgcaatctcagaaaaatgggactaaaagaaactattttgtaaaataagaagacttccatttttaatgaccaacatgtattaagatggacacctactctacgaaacacgaagttctatggtctcgaagaagcccgtgcctgtttaaaactgatcctaactaaaaacagacttgagtggatatgagaatgttggttagtggcagaagagtcaaaaaatggcagttaattattcagttatttgctacttgttttttagcgagcctcatgtttttttgggaaccaatcgataatcacattgtgagccatatgaagtcatattcttacagatacctcataaatagctatgactttgtgaatgataccctgtctcttaagcacacctcagcggggcctcgctaccaatacttgattaaccacaaggaaaagtgtcaagctcaagacgtcctccttttactgtttgtaaaaactgctcctgaaaactatgatcgacgttccggaattagaaggacgtggggcaatgaaaattatgttcggtctcagctgaatgccaacatcaaaactctgtttgccttaggaactcctaatccactggagggagaagaactacaaagaaaactggcttgggaagatcaaaggtacaatgatataattcagcaagactttgttgattctttctacaatcttactctgaaattacttatgcagttcagttgggcaaatacctattgtccacatgccaaatttcttatgactgctgatgatgacatatttattcacatgccaaatctgattgagtaccttcaaagtttagaacaaattggtgttcaagacttttggattggtcgtgttcatcgtggtgcccctcccattagagataaaagcagcaaatactacgtgtcctatgaaatgtaccagtggccagcttaccctgactacacagccggagctgcctatgtaatctccggtgatgtagctgccaaagtctatgaggcatcacagacactaaattcaagtctttacatagacgatgtgttcatgggcctctgtgccaataaaatagggatagtaccgcaggaccatgtgtttttttctggagagggtaaaactccttatcatccctgcatctatgaaaaaatgatgacatctcatggacacttagaagatctccaggacctttggaagaatgctacagatcctaaagtaaaaaccatttccaaaggtttttttggtcaaatatactgcagattaatgaagataattctcctttgtaaaattagctatgtggacacatacccttgtagggctgcgtttatctaatagtacttgaatgttgtatgttttcactgtcactgagtcaaacctggatgaaaaaaacctttaaatgttcgtctataccctaagtaaaatgaggacgaaagacaaatattttgaaagcctagtccatcagaatgtttctttgattctagaagctgtttaatatcacttatctacttcattgcctaagttcatttcaaagaatttgtatttagaaaaggtttatattattagtgaaaacaaaactaaagggaagttcaagttctcatgtaatgccacatatatacttgaggtgtagagatgttattaagaagttttgatgttagaataattgcttttggaaaataccaaatgaacgtacagtacaacatttcaaggaaatgaatatattgttagaccaggtaagcaagtttatttttgttaaagagcacttggtggaggtagtaggggcagggaaaggtcagcataggagagaaagttcatgaatctggtaaaacagtctcttgttcttaagaggagatgtagaaaaatgtgtacaatgttattataaacagacaaatcacgtcttaccacatccatgtagctactggtgttagagtcattaaaatacctttttttgcatcttttttcaaagtttaatgtgaacttttagaaaagtgattaatgttgccctaatactttatatgtttttaatggatttttttttaagtattagaaaatgacacataacacgggcagctggttgctcatagggtccttctctagggagaaaccattgttaattcaaataagctgattttaatgacgttttcaactggtttttaaatattcaatattggtctgtgtttaagtttgttatttgaatgtaatttacatagaggaatataataatggagagacttcaaatggaaagacagaacattacaagcctaatgtctccataattttataaaatgaaatcttagtgtctaaatccttgtactgattactaaaattaacccactcctccccaacaaggtcttataaaccacagcactttgttccaagttcagagttttaaattgagagcattaaacatcaaagttataatatctaaaacaatttatttttcatcaataactgtcagaggtgatctttattttctaaatatttcaaacttgaaaacagagtaaaaaagtgatagaaaagttgccagtttggggttaaagcatttttaaagctgcatgttccttgtaatcaaagagatgtgtctgagatctaatagagtaagttacatttattttacaaagcaggataaaaatgtggctataatacacactacctcccttcactacagaaagaactaggtggtgtctactgctagggagattatatgaaggccaaaataatgacttcagcaagagtgactgaactcactctaaggcctttgactgcagaggcacctgttagggaaaatcagatgtctcatataataaggtgatgtcggaaacacgcaaaacaaaacgaaaaaagatttctcagtatacacaactgaatgatgatacttacaatttttagcaggtagctttttaatgtttacagaaattttaatttttttctattttgaaatttgaggcttgtttacattgcttagataatttagaatttttaactaatgtcaaaactacagtgtcaaacattctaggttgtagttactttcagagtagatacagggttttagatcattacagtttaagttttctgaccaattaaaaaaacatagagaacaaaagcatatttgaccaagcaacaagcttataattaatttttattagttgattgattaatgatgtattgccttttgcccatatataccctgtgtatctatacttggaagtgtttaaggttgccattggttgaaaacataagtgtctctggccatcaaagtgatcttgtttacagcagtgcttttgtgaaacaattatttatttgctgaaagagctcttctgaactgtgtccttttaatttttgcttagaatagaatggaacaagtttaaatttcaaggaaatatgaaggcacttcctttttttctaagaaggaagttgctagatgattccttcatcacacttacttaaagtactgagaagagtatctgtaaataaaagggttccaaccttttaaaaaagaaggaaaaaactttttggtgctccagtgtagggctatctttttaaaaaatgtcaacaaagggaaaataaactatcagcttggatggtcacttgaatagaagatggttatacacagtgttattgttaaaatttttttaccttttggttggtttgcatcttttttccatattgttaattttataccaaaatgttaaatatttgtattacttgaattttgctcttgtatggcaaaataattagtgagtttaaaaaaaatctatagtttccaataaacaactgaaaaattatcatgaaaaaaaaa

SEQ ID NO: 186 - DNA, 921 bp, Homo sapiens
tgtgagctcctagaagtcagctttttcacttttacccaagccaaacggttattcgcgtaaggttggttataattaaaatgtcggtttgtgcacatggtttgggactctgtgtatgagtacgactaatatcttcaatttactaagaagataaagaggtcgataaataaggaggtcaagcccgttttgcaaggtcacacaggaaagaagcagaccacgaaatgaacttcggctgtcacctgcggtgggcgcactagaggtcttttgaactccttcggctaccgtcgccgcgttctcgctgtgcactcttattctgcgcctgcgcgcggctacagcacggttcgtttttcctttagtcaggaaggacgttggtgttgaggttagcatacgtatcaaggacagtaactaccatggctcccgaagttttgccaaaacctcggatgcgtggccttctggccaggcgtctgcgaaatcatatggctgtagcattcgtgctatccctgggggttgcagctttgtataagtttcgtgtggctgatcaaagaaagaaggcatacgcagatttctacagaaactacgatgtcatgaaagattttgaggagatgaggaaggctggtatctttcagagtgtaaagtaatcttggaatataaagaatttcttcaggttgaattacctagaagtttgtcactgacttgtgttcctgaactatgacacatgaatatgtgggctaagaaatagttcctcttgataaataaacaattaacaaatactttggacagtaagtctttctcagttcttaatgataatgcagggcacttactagcataagaattggtttgggatttaactgtttatgaagctaacttgatttccgtgttttgttaaaatttcattgttctagcacatctttaactgtgatagtt

SEQ ID NO: 187 - DNA, 3851 bp, Homo sapiens
ctctcccaaccgcctcgtcgcactcctcaggctgagagcaccgctgcactcgcggccggcgatgcgggaccccggcgcggccgctccgctttcgtccctgggcctctgtgccctggtgctggcgctgctgggcgcactgtccgcgggcgccggggcgcagccgtaccacggagagaagggcatctccgtgccggaccacggcttctgccagcccatctccatcccgctgtgcacggacatcgcctacaaccagaccatcctgcccaacctgctgggccacacgaaccaagaggacgcgggcctcgaggtgcaccagttctacccgctggtgaaggtgcagtgttctcccgaactccgctttttcttatgctccatgtatgcgcccgtgtgcaccgtgctcgatcaggccatcccgccgtgtcgttctctgtgcgagcgcgcccgccagggctgcgaggcgctcatgaacaagttcggcttccagtggcccgagcggctgcgctgcgagaacttcccggtgcacggtgcgggcgagatctgcgtgggccagaacacgtcggacggctccgggggcccaggcggcggccccactgcctaccctaccgcgccctacctgccggacctgcccttcaccgcgctgcccccgggggcctcagatggcagggggcgtcccgccttccccttctcatgcccccgtcagctcaaggtgcccccgtacctgggctaccgcttcctgggtgagcgcgattgtggcgccccgtgcgaaccgggccgtgccaacggcctgatgtactttaaggaggaggagaggcgcttcgcccgcctctgggtgggcgtgtggtccgtgctgtgctgcgcctcgacgctctttaccgttctcacctacctggtggacatgcggcgcttcagctacccagagcggcccatcatcttcctgtcgggctgctacttcatggtggccgtggcgcacgtggccggcttccttctagaggaccgcgccgtgtgcgtggagcgcttctcggacgatggctaccgcacggtggcgcagggcaccaagaaggagggctgcaccatcctcttcatggtgctctacttcttcggcatggccagctccatctggtgggtcattctgtctctcacttggttcctggcggccggcatgaagtggggccacgaggccatcgaggccaactcgcagtacttccacctggccgcgtgggccgtgcccgccgtcaagaccatcactatcctggccatgggccaggtagacggggacctgctgagcggggtgtgctacgttggcctctccagtgtggacgcgctgcggggcttcgtgctggcgcctctgttcgtctacctcttcataggcacgtccttcttgctggccggcttcgtgtccctcttccgtatccgcaccatcatgaaacacgacggcaccaagaccgagaagctggagaagctcatggtgcgcatcggcgtcttcagcgtgctctacacagtgcccgccaccatcgtcctggcctgctacttctacgagcaggccttccgcgagcactgggagcgcacctggctcctgcagacgtgcaagagctatgccgtgccctgcccgcccggccacttcccgcccatgagccccgacttcaccgtcttcatgatcaagtacctgatgaccatgatcgtcggcatcaccactggcttctggatctggtcgggcaagaccctgcagtcgtggcgccgcttctaccacagacttagccacagcagcaagggggagactgcggtatgagccccggcccctccccacctttcccaccccagccctcttgcaagaggagaggcacggtagggaaaagaactgctgggtgggggcctgtttctgtaactttctccccctctactgagaagtgacctggaagtgagaagttctttgcagatttggggcgaggggtgatttggaaaagaagacctgggtggaaagcggtttggatgaaaagatttcaggcaaagacttgcaggaagatgatgataacggcgatgtgaatcgtcaaaggtacgggccagcttgtgcctaatagaaggttgagaccagcagagactgctgtgagtttctcccggctccgaggctgaacggggactgtgagcgatccccctgctgcagggcgagtggcctgtccagacccctgtgaggccccgggaaaggtacagccctgtctgcggtggctgctttgttggaaagagggagggcctcctgcggtgtgcttgtcaagcagtggtcaaaccataatctcttttcactggggccaaactggagcccagatgggttaatttccagggtcagacattacggtctctcctcccctgccccctcccgcctgtttttcctcccgtactgctttcaggtcttgtaaaataagcatttggaagtcttgggaggcctgcctgctagaatcctaatgtgaggatgcaaaagaaatgatgataacattttgagataaggccaaggagacgtggagtaggtatttttgctactttttcattttctggggaaggcaggaggcagaaagacgggtgttttatttggtctaataccctgaaaagaagtgatgacttgttgcttttcaaaacaggaatgcatttttccccttgtctttgttgtaagagacaaaagaggaaacaaaagtgtctccctgtggaaaggcataactgtgacgaaagcaacttttataggcaaagcagcgcaaatctgaggtttcccgttggttgttaatttggttgagataaacattcctttttaaggaaaagtgaagagcagtgtgctgtcacacaccgttaagccagaggttctgacttcgctaaaggaaatgtaagaggttttgttgtctgttttaaataaatttaattcggaacacatgatccaacagactatgttaaaatattcagggaaatctctcccttcatttactttttcttgctataagcctatatttaggtttcttttctatttttttctcccatttggatcctttgaggtaaaaaaacataatgtcttcagcctcataataaaggaaagttaattaaaaaaaaaaagcaaagagccattttgtcctgttttcttggttccatcaatctgtttattaaacatcatccatatgctgaccctgtctctgtgtggttgggttgggaggcgatcagcagataccatagtgaacgaagaggaaggtttgaaccatgggccccatctttaaagaaagtcattaaaagaaggtaaacttcaaagtgattctggagttctttgaaatgtgctggaagacttaaatttattaatcttaaatcatgtactttttttctgtaatagaactcggattcttttgcatgatggggtaaagcttagcagagaatcatgggagctaacctttatcccacctttgacactaccctccaatcttgcaacactatcctgtttctcagaacagtttttaaatgccaatcatagagggtactgtaaagtgtacaagttactttatatatgtaatgttcacttgagtggaactgctttttacattaaagttaaaatcgatcttgtgtttcttcaaccttcaaaactatctcatctgtcagatttttaaaactccaacacaggttttggcatcttttgtgctgtatcttttaagtgcatgtgaaatttgtaaaatagagataagtacagtatgtatattttgtaaatctcccatttttgtaagaaaatatatattgtatttatacatttttactttggatttttgttttgttggctttaaaggtctaccccactttatcacatgtacagatcacaaataaatttttttaaatac

SEQ ID NO: 188 - DNA, 1220 bp, Homo sapiens
tcttttttttgcctgtccaccatctccctattaccctttggtcgagagggaaagcagaagaagtctgctggtcacagcggggcacctcgaggagaggacgactaggagcacacggcccggaaaggtccaggtcagggaagggaataactgtgcttgaagaagaaaattcccaacatggacaaaccacgcaaagaaaatgaagaagagccgcagagcgcgcccaagaccgatgaggagaggcctccggtggagcactctcccgaaaagcagtcccccgaggagcagtcttcggaggagcagtcctcggaggaggagttctttcctgaggagctcttgcctgagctcctgcctgagatgctcctctcggaggagcgccctccgcaggagggtctttccaggaaggacctgtttgaggggcgccctcccatggagcagcctccttgtggagtaggaaaacataagcttgaagaaggaagctttaaagaaaggttggctcgttctcgcccgcaatttagaggggacatacatggcagaaatttaagcaatgaggagatgatacaggcagcagatgagctagaagagatgaaaagagtaagaaacaaactgatgataatgcactggaaggcaaaacggagccgtccttatcctatttaatgtgttcggcctttaattctgttttgcctgctaatagtattgccattgccacctggactttctgtttgcattttcttaatgccttttcccatattctgaattttaactttttgtgaggctttattttagatgtttagcatgtaactcgcttaaagttgaggtttccccctaaaatctacaagtttccctctttcagtcatgagccctacacatttgcatgaaagatgtacattatatattgtgaaacgaaaaaagcaattttcaaatggtatatattgtatcccatttttgtaaaaaaaatgtatatttatatattaatatgcaaagaaaaagctaaaagtatagacttcaaaggcataacagtggttgtgtggtaagataataggtgattttttaaatttttgttttatctgaatttctcattttttcaggacaaacgttttacttgtgttgcaaaaatatataatgaaaaaatcacacaattttgaagaaaactgtcaatcagcttataacgacaatgtggcacttaataaatacttgtcagaactttaaaaaaaaaaaaaaaa

SEQ ID NO: 189 - DNA, 5189 bp, Homo sapiens
ctgggggctcggctttgccgcgctcgctgcacttgggcgagagctggaacgtggaccagagctcggatcccatcgcagctaccgcgatgagaggcgctcgcggcgcctgggattttctctgcgttctgctcctactgcttcgcgtccagacaggctcttctcaaccatctgtgagtccaggggaaccgtctccaccatccatccatccaggaaaatcagacttaatagtccgcgtgggcgacgagattaggctgttatgcactgatccgggctttgtcaaatggacttttgagatcctggatgaaacgaatgagaataagcagaatgaatggatcacggaaaaggcagaagccaccaacaccggcaaatacacgtgcaccaacaaacacggcttaagcaattccatttatgtgtttgttagagatcctgccaagcttttccttgttgaccgctccttgtatgggaaagaagacaacgacacgctggtccgctgtcctctcacagacccagaagtgaccaattattccctcaaggggtgccaggggaagcctcttcccaaggacttgaggtttattcctgaccccaaggcgggcatcatgatcaaaagtgtgaaacgcgcctaccatcggctctgtctgcattgttctgtggaccaggagggcaagtcagtgctgtcggaaaaattcatcctgaaagtgaggccagccttcaaagctgtgcctgttgtgtctgtgtccaaagcaagctatcttcttagggaaggggaagaattcacagtgacgtgcacaataaaagatgtgtctagttctgtgtactcaacgtggaaaagagaaaacagtcagactaaactacaggagaaatataatagctggcatcacggtgacttcaattatgaacgtcaggcaacgttgactatcagttcagcgagagttaatgattctggagtgttcatgtgttatgccaataatacttttggatcagcaaatgtcacaacaaccttggaagtagtagataaaggattcattaatatcttccccatgataaacactacagtatttgtaaacgatggagaaaatgtagatttgattgttgaatatgaagcattccccaaacctgaacaccagcagtggatctatatgaacagaaccttcactgataaatgggaagattatcccaagtctgagaatgaaagtaatatcagatacgtaagtgaacttcatctaacgagattaaaaggcaccgaaggaggcacttacacattcctagtgtccaattctgacgtcaatgctgccatagcatttaatgtttatgtgaatacaaaaccagaaatcctgacttacgacaggctcgtgaatggcatgctccaatgtgtggcagcaggattcccagagcccacaatagattggtatttttgtccaggaactgagcagagatgctctgcttctgtactgccagtggatgtgcagacactaaactcatctgggccaccgtttggaaagctagtggttcagagttctatagattctagtgcattcaagcacaatggcacggttgaatgtaaggcttacaacgatgtgggcaagacttctgcctattttaactttgcatttaaaggtaacaacaaagagcaaatccatccccacaccctgttcactcctttgctgattggtttcgtaatcgtagctggcatgatgtgcattattgtgatgattctgacctacaaatatttacagaaacccatgtatgaagtacagtggaaggttgttgaggagataaatggaaacaattatgtttacatagacccaacacaacttccttatgatcacaaatgggagtttcccagaaacaggctgagttttgggaaaaccctgggtgctggagctttcgggaaggttgttgaggcaactgcttatggcttaattaagtcagatgcggccatgactgtcgctgtaaagatgctcaagccgagtgcccatttgacagaacgggaagccctcatgtctgaactcaaagtcctgagttaccttggtaatcacatgaatattgtgaatctacttggagcctgcaccattggagggcccaccctggtcattacagaatattgttgctatggtgatcttttgaattttttgagaagaaaacgtgattcatttatttgttcaaagcaggaagatcatgcagaagctgcactttataagaatcttctgcattcaaaggagtcttcctgcagcgatagtactaatgagtacatggacatgaaacctggagtttcttatgttgtcccaaccaaggccgacaaaaggagatctgtgagaataggctcatacatagaaagagatgtgactcccgccatcatggaggatgacgagttggccctagacttagaagacttgctgagcttttcttaccaggtggcaaagggcatggctttcctcgcctccaagaattgtattcacagagacttggcagccagaaatatcctccttactcatggtcggatcacaaagatttgtgattttggtctagccagagacatcaagaatgattctaattatgtggttaaaggaaacgctcgactacctgtgaagtggatggcacctgaaagcattttcaactgtgtatacacgtttgaaagtgacgtctggtcctatgggatttttctttgggagctgttctctttaggaagcagcccctatcctggaatgccggtcgattctaagttctacaagatgatcaaggaaggcttccggatgctcagccctgaacacgcacctgctgaaatgtatgacataatgaagacttgctgggatgcagatcccctaaaaagaccaacattcaagcaaattgttcagctaattgagaagcagatttcagagagcaccaatcatatttactccaacttagcaaactgcagccccaaccgacagaagcccgtggtagaccattctgtgcggatcaattctgtcggcagcaccgcttcctcctcccagcctctgcttgtgcacgacgatgtctgagcagaatcagtgtttgggtcacccctccaggaatgatctcttcttttggcttccatgatggttattttcttttctttcaacttgcatccaactccaggatagtgggcaccccactgcaatcctgtctttctgagcacactttagtggccgatgatttttgtcatcagccaccatcctattgcaaaggttccaactgtatatattcccaatagcaacgtagcttctaccatgaacagaaaacattctgatttggaaaaagagagggaggtatggactgggggccagagtcctttccaaggcttctccaattctgcccaaaaatatggttgatagtttacctgaataaatggtagtaatcacagttggccttcagaaccatccatagtagtatgatgatacaagattagaagctgaaaacctaagtcctttatgtggaaaacagaacatcattagaacaaaggacagagtatgaacacctgggcttaagaaatctagtatttcatgctgggaatgagacataggccatgaaaaaaatgatccccaagtgtgaacaaaagatgctcttctgtggaccactgcatgagcttttatactaccgacctggtttttaaatagagtttgctattagagcattgaattggagagaaggcctccctagccagcacttgtatatacgcatctataaattgtccgtgttcatacatttgaggggaaaacaccataaggtttcgtttctgtatacaaccctggcattatgtccactgtgtatagaagtagattaagagccatataagtttgaaggaaacagttaataccattttttaaggaaacaatataaccacaaagcacagtttgaacaaaatctcctcttttagctgatgaacttattctgtagattctgtggaacaagcctatcagcttcagaatggcattgtactcaatggatttgatgctgtttgacaaagttactgattcactgcatggctcccacaggagtgggaaaacactgccatcttagtttggattcttatgtagcaggaaataaagtataggtttagcctccttcgcaggcatgtcctggacaccgggccagtatctatatatgtgtatgtacgtttgtatgtgtgtagacaaatatttggaggggtatttttgccctgagtccaagagggtcctttagtacctgaaaagtaacttggctttcattattagtactgctcttgtttcttttcacatagctgtctagagtagcttaccagaagcttccatagtggtgcagaggaagtggaaggcatcagtccctatgtatttgcagttcacctgcacttaaggcactctgttatttagactcatcttactgtacctgttccttagaccttccataatgctactgtctcactgaaacatttaaattttaccctttagactgtagcctggatattattcttgtagtttacctctttaaaaacaaaacaaaacaaaacaaaaaactccccttcctcactgcccaatataaaaggcaaatgtgtacatggcagagtttgtgtgttgtcttgaaagattcaggtatgttgcctttatggtttcccccttctacatttcttagactacatttagagaactgtggccgttatctggaagtaaccatttgcactggagttctatgctctcgcacctttccaaagttaacagattttggggttgtgttgtcacccaagagattgttgtttgccatactttgtctgaaaaattcctttgtgtttctattgacttcaatgatagtaagaaaagtggttgttagttatagatgtctaggtacttcaggggcacttcattgagagttttgtcttggatattcttgaaagtttatatttttataattttttcttacatcagatgtttctttgcagtggcttaatgtttgaaattattttgtggctttttttgtaaatattgaaatgtagcaataatgtcttttgaatattcccaagcccatgagtccttgaaaatattttttatatatacagtaactttatgtgtaaatacataagcggcgtaagtttaaaggatgttggtgttccacgtgttttattcctgtatgttgtccaattgttgacagttctgaagaattctaataaaatgtacatatataaatcaaaaaaaaaaaaaaaa

SEQ ID NO: 190 - DNA, 1574 bp, Homo sapiens
atcgctacgcccacttggtggcctataaaggaagcgggcgaaccccggcagccctacacaacttggggcccctctcctctccagcccttctcctgtgtgcctgcctcctgccgccgccaccatgaccacctccatccgccagttcacctcctccagctccatcaagggctcctccggcctggggggcggctcgtcccgcacctcctgccggctgtctggcggcctgggtgccggctcctgcaggctgggatctgctggcggcctgggcagcaccctcgggggtagcagctactccagctgctacagctttggctctggtggtggctatggcagcagctttgggggtgttgatgggctgctggctggaggtgagaaggccaccatgcagaacctcaatgaccgcctggcctcctacctggacaaggtgcgtgccctggaggaggccaacactgagctggaggtgaagatccgtgactggtaccagaggcaggccccggggcccgcccgtgactacagccagtactacaggacaattgaggagctgcagaacaagatcctcacagccaccgtggacaatgccaacatcctgctacagattgacaatgcccgtctggctgctgatgacttccgcaccaagtttgagacagagcaggccctgcgcctgagtgtggaggccgacatcaatggcctgcgcagggtgctggatgagctgaccctggccagagccgacctggagatgcagattgagaacctcaaggaggagctggcctacctgaagaagaaccacgaggaggagatgaacgccctgcgaggccaggtgggtggtgagatcaatgtggagatggacgctgccccaggcgtggacctgagccgcatcctcaacgagatgcgtgaccagtatgagaagatggcagagaagaaccgcaaggatgccgaggattggttcttcagcaagacagaggaactgaaccgcgaggtggccaccaacagtgagctggtgcagagtggcaagagtgagatctcggagctccggcgcaccatgcaggccttggagatagagctgcagtcccagctcagcatgaaagcatccctggagggcaacctggcggagacagagaaccgctactgcgtgcagctgtcccagatccaggggctgattggcagcgtggaggagcagctggcccagcttcgctgcgagatggagcagcagaaccaggaatacaaaatcctgctggatgtgaagacgcggctggagcaggagattgccacctaccgccgcctgctggagggagaggatgcccacctgactcagtacaagaaagaaccggtgaccacccgtcaggtgcgtaccattgtggaagaggtccaggatggcaaggtcatctcctcccgcgagcaggtccaccagaccacccgctgaggactcagctaccccggccggccacccaggaggcagggaggcagccgccccatctgccccacagtctccggcctctccagcctcagccccctgcttcagtcccttccccatgcttccttgcctgatgacaataaagcttgttgactcagctatg

SEQ ID NO: 191 - DNA, 4276 bp, Homo sapiens
tgcgttttaaaaattgtctttatttacattttacagaaagttgagaaagtgttatttatatggggggtaggggtgctggagattatgagactaataacaaccctcttagctcgcaccctttggcaccactacagcttccaaactctgggactttctcgactagcttccctttgtttagctgtgaaatggaagaagcggtccgggtgtggcggctcatgcctgtaacctgagcactctgggaggcggaggatcgcttgagtccagaagttcaagaccagcttgggcaacatagggtgaccctccaccctccccccgccccaccacatcgctacaaaaaatttttaaaaattagccgggtgtggtggcgcaagcctgtagtctcagcgggagctgagggaggagaatcgcttcagcccgggaggtcgaggctgtagtgagccgagatcgcgctactgcactcctgggcgacagagcgagaccctgtctccaaaaaaaaaaaaaaaagaaaaaagaggaagttgtatccaattcagaaacgcggtccttcgggacctgctagttttataccccggaggatcctccccggcgggctggcacgggaggtggagaaagaggcttgggcggccccgctgtagccgcgtgtgggaggacgcacgggcctgcttcaaagctttgggataacagcgcctccgggggataatgaatgcggagcctccgttttcagtcgacttcagatgtgtctccacttttttccgctgtagccgcaaggcaaggaaacatttctcttcccgtactgaggaggctgaggagtgcactgggtgttcttttctcctctaacccagaactgcgagacagaggctgagtccctgtaaagaacagctccagaaaagccaggagagcgcaggagggcatccgggaggccaggaggggttcgctggggcctcaaccgcacccacatcggtcccacctgcgagggggcgggacctcgtggcgctggaccaatcagcacccacctgcgctcacctggcctcctcccgctggctcccgggggctgcggtgctcaaaggggcaagagctgagcggaacaccggcccgccgtcgcggcagctgcttcacccctctctctgcagccatggggctccctcgtggacctctcgcgtctctcctccttctccaggtttgctggctgcagtgcgcggcctccgagccgtgccgggcggtcttcagggaggctgaagtgaccttggaggcgggaggcgcggagcaggagcccggccaggcgctggggaaagtattcatgggctgccctgggcaagagccagctctgtttagcactgataatgatgacttcactgtgcggaatggcgagacagtccaggaaagaaggtcactgaaggaaaggaatccattgaagatcttcccatccaaacgtatcttacgaagacacaagagagattgggtggttgctccaatatctgtccctgaaaatggcaagggtcccttcccccagagactgaatcagctcaagtctaataaagatagagacaccaagattttctacagcatcacggggccgggggcagacagcccccctgagggtgtcttcgctgtagagaaggagacaggctggttgttgttgaataagccactggaccgggaggagattgccaagtatgagctctttggccacgctgtgtcagagaatggtgcctcagtggaggaccccatgaacatctccatcatcgtgaccgaccagaatgaccacaagcccaagtttacccaggacaccttccgagggagtgtcttagagggagtcctaccaggtacttctgtgatgcaggtgacagccacggatgaggatgatgccatctacacctacaatggggtggttgcttactccatccatagccaagaaccaaaggacccacacgacctcatgttcaccattcaccggagcacaggcaccatcagcgtcatctccagtggcctggaccgggaaaaagtccctgagtacacactgaccatccaggccacagacatggatggggacggctccaccaccacggcagtggcagtagtggagatccttgatgccaatgacaatgctcccatgtttgacccccagaagtacgaggcccatgtgcctgagaatgcagtgggccatgaggtgcagaggctgacggtcactgatctggacgcccccaactcaccagcgtggcgtgccacctaccttatcatgggcggtgacgacggggaccattttaccatcaccacccaccctgagagcaaccagggcatcctgacaaccaggaagggtttggattttgaggccaaaaaccagcacaccctgtacgttgaagtgaccaacgaggccccttttgtgctgaagctcccaacctccacagccaccatagtggtccacgtggaggatgtgaatgaggcacctgtgtttgtcccaccctccaaagtcgttgaggtccaggagggcatccccactggggagcctgtgtgtgtctacactgcagaagaccctgacaaggagaatcaaaagatcagctaccgcatcctgagagacccagcagggtggctagccatggacccagacagtgggcaggtcacagctgtgggcaccctcgaccgtgaggatgagcagtttgtgaggaacaacatctatgaagtcatggtcttggccatggacaatggaagccctcccaccactggcacgggaacccttctgctaacactgattgatgtcaatgaccatggcccagtccctgagccccgtcagatcaccatctgcaaccaaagccctgtgcgccaggtgctgaacatcacggacaaggacctgtctccccacacctcccctttccaggcccagctcacagatgactcagacatctactggacggcagaggtcaacgaggaaggtgacacagtggtcttgtccctgaagaagttcctgaagcaggatacatatgacgtgcacctttctctgtctgaccatggcaacaaagagcagctgacggtgatcagggccactgtgtgcgactgccatggccatgtcgaaacctgccctggaccctggaagggaggtttcatcctccctgtgctgggggctgtcctggctctgctgttcctcctgctggtgctgcttttgttggtgagaaagaagcggaagatcaaggagcccctcctactcccagaagatgacacccgtgacaacgtcttctactatggcgaagaggggggtggcgaagaggaccaggactatgacatcacccagctccaccgaggtctggaggccaggccggaggtggttctccgcaatgacgtggcaccaaccatcatcccgacacccatgtaccgtcctcggccagccaacccagatgaaatcggcaactttataattgagaacctgaaggcggctaacacagaccccacagccccgccctacgacaccctcttggtgttcgactatgagggcagcggctccgacgccgcgtccctgagctccctcacctcctccgcctccgaccaagaccaagattacgattatctgaacgagtggggcagccgcttcaagaagctggcagacatgtacggtggcggggaggacgactaggcggcctgcctgcagggctggggaccaaacgtcaggccacagagcatctccaaggggtctcagttcccccttcagctgaggacttcggagcttgtcaggaagtggccgtagcaacttggcggagacaggctatgagtctgacgttagagtggtggcttccttagcctttcaggatggaggaatgtgggcagtttgacttcagcactgaaaacctctccacctgggccagggttgcctcagaggccaagtttccagaagcctcttacctgccgtaaaatgctcaaccctgtgtcctgggcctgggcctgctgtgactgacctacagtggactttctctctggaatggaaccttcttaggcctcctggtgcaacttaatttttttttttaatgctatcttcaaaacgttagagaaagttcttcaaaagtgcagcccagagctgctgggcccactggccgtcctgcatttctggtttccagaccccaatgcctcccattcggatggatctctgcgtttttatactgagtgtgcctaggttgccccttattttttattttccctgttgcgttgctatagatgaagggtgaggacaatcgtgtatatgtactagaacttttttattaaagaaacttttcccagaggtgcctggggagtg

SEQ ID NO: 192 - DNA, 4144 bp, Homo sapiens
ggttggttctgagaaggcttcaaggaataggcagacatttcagcaaggctgctgaggaaggataggctgtggaaattaggatgcagcactcctgcccgggtcccgcctcggggtcgccaggccctgaaccccaacgccggcattagtcgcgcctgcgcacggccctgtggagccgcggaggcaagggacggagaacggggcggaggcggagtcagggcgcccgcgcgtgggccccgcccccttatgtcgggtataaagcccctcccgctcacagtttccctagtcctcgaaggctcggaagcccgtcaccatgtcgtgcgagtcgtctatggttctcgggtactgggatattcgtgggctggcgcacgccatccgcctgctcctggagttcacggatacctcttatgaggagaaacggtacacgtgcggggaagctcctgactatgatcgaagccaatggctggatgtgaaattcaagctagacctggactttcctaatctgccctacctcctggatgggaagaacaagatcacccagagcaatgccatcttgcgctacatcgctcgcaagcacaacatgtgtggtgagactgaagaagaaaagattcgagtggacatcatagagaaccaagtaatggatttccgcacacaactgataaggctctgttacagctctgaccacgaaaaactgaagcctcagtacttggaagagctacctggacaactgaaacaattctccatgtttctggggaaattctcatggtttgccggggaaaagctcacctttgtggattttctcacctatgatatcttggatcagaaccgtatatttgaccccaagtgcctggatgagttcccaaacctgaaggctttcatgtgccgttttgaggctttggagaaaatcgctgcctacttacagtctgatcagttctgcaagatgcccatcaacaacaagatggcccagtggggcaacaagcctgtatgctgagcaggaggcagacttgcagagcttgttttgtttcatcctgtccgtaaggggtcagcgctcttgctttgctcttttcaatgaatagcacttatgttactggtgtccagctgagtttctcttgggtataaaggctaaaagggaaaaaggatatgtggagaatcatcaagatatgaattgaatcgctgcgatactggcatttccctactccccaactgagttcaagggctgtaggttcatgcccaagccctgagagtgggtactagaaaaaacgagattgcacagttggagagagcaggtgtgttaaatgggactggagtccctgtgaagactgggtgaggataacacaagtaaaactgtggtactgatggacttaaccggagttcggaaaccgtcctgtgtacacatgggagtttagtgtgataaaggcagtatttcagactggtgggctagccaatagagttgggacaattgcttactcattaaaaataatagagccccacttgacactattcactaaaattaatctggaatttaaggcccaacattaaacacaaagctgttgaaatattgatgaaaatgtaagaatttttgtgaccacggggtaggagaagtttctttaaagacgtaaaaagaaaaaaaccataggctgctctgcctgtggagtagccattctttattcttttactttttaaaataataacaatcacaaaggaaagatttgccaattgaataggatcaaattctacaacttttcctaaggcacccacaaataaatgacaagtgagacaaaaagcactagtataaagattatataaagacctataaatcattaagacaactgagtttttaaaaatggacaaaatccatgaacaatttataaaatagaaatatagccaaaaatgtctaaaagatgtttatgatgtaaggaattatcaattacaacagtgagaaaccatatttccttctatccgatgagtaaaaagtttctaaagtgttggcaaggcttaggaaagtgatatgcatttcctgctggtcaagttgtaaattagtatagctactttggaggacaattgtaaaatttaaatcatatcctatgacccagcaattccatgctataaaaactcatccatggccgggcttggtggctcacgcctgtaatcccagcactttgggaggctgaggtgggcagatcacgaggtcaagagatcgagaccatcctggccaacatgatgaaaccccgtttctactaaaaatacaaaaattagctgggcatggtggcatgtgcctatagtcccagctactcaggaggctgaggcaggagaattgcttgaacctgggaggcagaggttgcagtgagccgagatcacgccactgcactccagcctggctacagggcgagactctgtctcaaaaaaaaaaaaaaaaaaaaaaaaaaaacattcaaagagacatatactaagatgttcactgtggcattgtctgtaatgacaaataagtggaaaccgtgtaaatacctgtcaatactatggagtaccatgtggcaacggaagaatgagactgaactgtgtgaactaacatgcaaagatccccaaaacaggccaggtgtggttgctcacagctgtaataacaacaccttcagaggctgaggtgagaggatcagttgaggccaggagtttaagaccagcctgggcaacatagtgagacccctgtctcccaaaaattttttttaattagctgtgcgcaattgctcatgcatagtcccagctacccaggaggctgaggtgggaggatcacttgagcccaggaatttgaagctgcagtgagctgtgttcttgccactgcactccaatctgggtgactgagcaagaccctgtctcttaaaaaaataaaaaagatctccaagcatagagaagagtctggagggaaacaccaaactcataacagtcttactgcaggcaagtgggataaaggcccagactccatggtggaagttaaagggcatttccaagttaaggctaagacttgcttttctaactaagagaatgtgctcatgcattgcttgtgtagtagaaactagtttttagaaaagaaagcaaacttaagaaacactgactcctgtggagatgacttggcaccactctcctttcacagagcagagtctgaatagtcttcagagataggcctgtgggccagattgccatcccctatggaccagaagccaaggatctctctagtgatggtcagagggcccaaatggcagggatacccagtgatgtcaggaggaatagtacagacagaaggtgctaagcagacaattcaactgccatgttttgccaccccctgtgagcagggattaggtgttcaggccagtatcttgggcatgggggagcctttggccagaagaggtataaagctcagaagtttttcagtctgataactattgatataatttccatagtgtgagggagcggtatgctctacccttgtgtatttaaggcaggacagagaaattgaggatgcccctggggctagatcgatgatatgaccagaaatcaaaaagggaatgcattatttattgctgtgtaacactgttaagagaggaggtagttaagggatggataggcacatagagagggaaggtctcaggagaagggatagaaaggaactatgttcacaagaacaacggcaagacagtgcctatactgcctctacagttaataggaaaaacggaagaagttacccttaagctaggatgttgctcagaagtgaccatcccaactttggtgcgggcacaataaatcagcctaaatgtccctaatttaacccagctcattataatgtcattaaacatgacattagcattgtggttttagcacccccatgggttttgcttaggcactcatgggtaataaccaagatggagtccctttggcaaaacttaggcatgcacagctgtagtaccccaagaagaaaatgttacttctctcatctgggcaaaacccacagaagacttcccagcttctgccacataaaagacacagaacacagacgccttactggcaacctgctttcaagacccctgtctttgctgagagctttcctttttcccaataaattctactctgccctactcactctcaaaaaaaaaaaaaaaaa

SEQ ID NO: 193 - DNA, 4670 bp, Homo sapiens
gctggggcccgacccgggattagttggtttcggagcggaggagggagccccgaccgtcacgagcgtcgaagagacaaagccgcgtcagggggcccggccggggcgggggagcccggggcttgttggtgccccagcccgcgcggagggcccttcggacccgcgcgccgccgctgccgccgccgccgcctcgcaacaggtccgggcggcctcgctctccgctcccctcccccgcatccgcgaccctccggggcacctcagctcggccggggccgcagtctggccacccgcttccatgcggttcgggtccaagatgatgccgatgtttcttaccgtgtatctcagtaacaatgagcagcacttcacagaagttccagttactccagaaacaatatgcagagacgtggtggatctgtgcaaagaacccggcgagagtgattgccatttggctgaagtgtggtgtggctctgaacgtccagttgcggataatgagcgaatgtttgatgttcttcaacgatttggaagtcagaggaacgaagttcgcttcttccttcgtcatgaacgcccccctggcagggacattgtgagtggaccaagatctcaggatccaagtttaaaaagaaatggtgtaaaagttcctggtgaatatcgaagaaaggagaacggtgttaatagtcctaggatggatctgactcttgctgaacttcaggaaatggcatctcgccagcagcaacagattgaagcccagcaacaattgctggcaactaaggaacagcgcttaaagtttttgaaacaacaagatcagcgacaacagcaacaagttgctgagcaggagaaacttaaaaggctaaaagaaatagctgagaatcaggaagctaagctaaaaaaagtgagagcacttaaaggccacgtggaacagaagagactaagcaatgggaaacttgtggaggaaattgaacagatgaataatttgttccagcaaaaacagagggagctcgtcctggctgtgtcaaaagtagaagaactgaccaggcagctagagatgctcaagaacggcaggatcgacagccaccatgacaatcagtctgcagtggctgagcttgatcgcctctataaggagctgcagctaagaaacaaattgaatcaagagcagaatgccaagctacaacaacagagggagtgtttgaataagcgtaattcagaagtggcagtcatggataagcgtgttaatgagctgagggaccggctgtggaagaagaaggcagctctacagcaaaaagaaaatctaccagtttcatctgatggaaatcttccccagcaagccgcgtcagccccaagccgtgtggctgcagtaggtccctatatccagtcgtctactatgcctcggatgccctcaaggcctgaattgctggtgaagccagccctgccggatggttccttggtcattcaggcttcagaggggccgatgaaaatacagacactgcccaacatgagatctggggctgcttcacaaactaaaggctctaaaatccatccagttggccctgattggagtccttcaaatgcagatcttttcccaagccaaggctctgcttctgtacctcaaagcactgggaatgctctggatcaagttgatgatggagaggttccgctgagggagaaagagaagaaagtgcgtccgttctcaatgtttgatgcagtagaccagtccaatgccccaccttcctttggtactctgaggaagaaccagagcagtgaagatatcttgcgggatgctcaggttgcaaataaaaatgtggctaaagtaccacctcctgttcctacaaaaccaaaacagattaatttgccttattttggacaaactaatcagccaccttcagacattaagccagacggaagttctcagcagttgtcaacagttgttccgtccatgggaactaaaccaaaaccagcagggcagcagccgagagtgctgctatctcccagcataccttcggttggccaagaccagaccctttctccaggttctaagcaagaaagtccacctgctgctgccgtccggccctttactccccagccttccaaagacaccttacttccacccttcagaaaaccccagaccgtggcagcaagttcaatatattccatgtatacgcaacagcaggcgccaggaaaaaacttccagcaggctgtgcagagcgcgttgaccaagactcataccagagggccacacttttcaagtgtatatggtaagcctgtaattgctgctgcccagaatcaacagcagcacccagagaacatttattccaatagccagggcaagcctggcagtccagaacctgaaacagagcctgtttcttcagttcaggagaaccatgaaaacgaaagaattcctcggccactcagcccaactaaattactgcctttcttatctaatccttaccgaaaccagagtgatgctgacctagaagccttacgaaagaaactgtctaacgcaccaaggcctctaaagaaacgtagttctattacagagccagagggtcctaatgggccaaatattcagaagcttttatatcagaggaccaccatagcggccatggagaccatctctgtcccatcatacccatccaagtcagcttctgtgactgccagctcagaaagcccagtagaaatccagaatccatatttacatgtggagcccgaaaaggaggtggtctctctggttcctgaatcattgtccccagaggatgtggggaatgccagtacagagaacagtgacatgccagctccttctccaggccttgattatgagcctgagggagtcccagacaacagcccaaatctccagaataacccagaagaaccaaatccagaggctccacatgtgcttgatgtgtacctggaggagtaccctccatacccacccccaccatacccatctggggagcctgaagggcccggagaagactcggtgagcatgcgcccgcctgaaatcaccgggcaggtctctctgcctcctggtaaaaggacaaacttgcgtaaaactggctcagagcgtatcgctcatggaatgagggtgaaattcaacccccttgctttactgctagattcgtctttggagggagaatttgaccttgtacagagaattatttatgaggttgatgacccaagcctccccaatgatgaaggcatcacggctcttcacaatgctgtgtgtgcaggccacacagaaatcgttaagttcctggtacagtttggtgtaaatgtaaatgctgctgatagtgatggatggactccattacattgtgctgcctcatgtaacaacgtccaagtgtgtaagtttttggtggagtcaggagccgctgtgtttgccatgacctacagtgacatgcagactgctgcagataagtgcgaggaaatggaggaaggctacactcagtgctcccaatttctttatggagttcaggagaagatgggcataatgaataaaggagtcatttatgcgctttgggattatgaacctcagaatgatgatgagctgcccatgaaagaaggagactgcatgacaatcatccacagggaagacgaagatgaaatcgaatggtggtgggcgcgccttaatgataaggagggatatgttccacgtaacttgctgggactgtacccaagaattaaaccaagacaaaggagcttggcctgaaacttccacacagaattttagtcaatgaagaattaatctctgttaagaagaagtaatacgattatttttggcaaaaatttcacaagacttattttaatgacaatgtagcttgaaagcgatgaagaatgtctctagaagagaatgaaggattgaagaattcaccattagaggacatttagcgtgatgaaataaagcatctacgtcagcaggccatactgtgttggggcaaaggtgtcccgtgtagcactcagataagtatacagcgacaatcctgttttctacaagaatcctgtctagtaaataggatcatttattgggcagttgggaaatcagctctctgtcctgttgagtgttttcagcagctgctcctaaaccagtcctcctgccagaaaggaccagtgccgtcacatcgctgtctctgattgtccccggcaccagcaggcccttggggggctcacctgaaggctcgaaggcactgcacacttgtatattgtcagtgaagaactgttagttggttgtcagtgaacaataactttattatatgagtttttgtagcatcttaagaattatacatatgtttgaaatattgaaactaagctacggtaccagtaattagatgtagaatcttgtttgtaggctgaattttaatctgtatttattgtcttttgtatctcagaaattagaaacttgctacagacttacccgtaatatttgtcaagatcatagctgactttaaaaacagttgtaataaactttttgatgctagctgtttactggtttttgtttttgatgtcataaatagaccttgtttaatagtcacaagccgttgggatatcatacccagctgaaaaagaacaaactgcttaacataagtatatgtatcgtaataagagttttttaccagctaagtgattcaatgtaagtggtttttaaaataaaatactgtagagatcatggtgaaaaaaaaaaaaaa

SEQ ID NO: 194 - DNA, 10316 bp, Homo sapiens
gagaccagaagcgggcgaattgggcaccggtggcggctgcgggcagtttgaattagactctgggctccagcccgccgaagccgcgccagaactgtactctccgagaggtcgttttcccgtccccgagagcaagtttatttacaaatgttggagtaataaagaaggcagaacaaaatgagctgggctttggaagaatggaaagaagggctgcctacaagagctcttcagaaaattcaagagcttgaaggacagcttgacaaactgaagaaggaaaagcagcaaaggcagtttcagcttgacagtctcgaggctgcgctgcagaagcaaaaacagaaggttgaaaatgaaaaaaccgagggtacaaacctgaaaagggagaatcaaagattgatggaaatatgtgaaagtctggagaaaactaagcagaagatttctcatgaacttcaagtcaaggagtcacaagtgaatttccaggaaggacaactgaattcaggcaaaaaacaaatagaaaaactggaacaggaacttaaaaggtgtaaatctgagcttgaaagaagccaacaagctgcgcagtctgcagatgtctctctgaatccatgcaatacaccacaaaaaatttttacaactccactaacaccaagtcaatattatagtggttccaagtatgaagatctaaaagaaaaatataataaagaggttgaagaacgaaaaagattagaggcagaggttaaagccttgcaggctaaaaaagcaagccagactcttccacaagccaccatgaatcaccgcgacattgcccggcatcaggcttcatcatctgtgttctcatggcagcaagagaagaccccaagtcatctttcatctaattctcaaagaactccaattaggagagatttctctgcatcttacttttctggggaacaagaggtgactccaagtcgatcaactttgcaaatagggaaaagagatgctaatagcagtttctttgacaattctagcagtcctcatcttttggatcaattaaaagcgcagaatcaagagctaagaaacaagattaatgagttggaactacgcctgcaaggacatgaaaaagaaatgaaaggccaagtgaataagtttcaagaactccaactccaactggagaaagcaaaagtggaattaattgaaaaagagaaagttttgaacaaatgtagggatgaactagtgagaacaacagcacaatacgaccaggcgtcaaccaagtatactgcattggaacaaaaactgaaaaaattgacggaagatttgagttgtcagcgacaaaatgcagaaagtgccagatgttctctggaacagaaaattaaggaaaaagaaaaggagtttcaagaggagctctcccgtcaacagcgttctttccaaacactggaccaggagtgcatccagatgaaggccagactcacccaggagttacagcaagccaagaatatgcacaacgtcctgcaggctgaactggataaactcacatcagtaaagcaacagctagaaaacaatttggaagagtttaagcaaaagttgtgcagagctgaacaggcgttccaggcgagtcagatcaaggagaatgagctgaggagaagcatggaggaaatgaagaaggaaaacaacctccttaagagtcactctgagcaaaaggccagagaagtctgccacctggaggcagaactcaagaacatcaaacagtgtttaaatcagagccagaattttgcagaagaaatgaaagcgaagaatacctctcaggaaaccatgttaagagatcttcaagaaaaaataaatcagcaagaaaactccttgactttagaaaaactgaagcttgctgtggctgatctggaaaagcagcgagattgttctcaagaccttttgaagaaaagagaacatcacattgaacaacttaatgataagttaagcaagacagagaaagagtccaaagccttgctgagtgctttagagttaaaaaagaaagaatatgaagaattgaaagaagagaaaactctgttttcttgttggaaaagtgaaaacgaaaaacttttaactcagatggaatcagaaaaggaaaacttgcagagtaaaattaatcacttggaaacttgtctgaagacacagcaaataaaaagtcatgaatacaacgagagagtaagaacgctggagatggacagagaaaacctaagtgtcgagatcagaaaccttcacaacgtgttagacagtaagtcagtggaggtagagacccagaaactagcttatatggagctacagcagaaagctgagttctcagatcagaaacatcagaaggaaatagaaaatatgtgtttgaagacttctcagcttactgggcaagttgaagatctagaacacaagcttcagttactgtcaaatgaaataatggacaaagaccggtgttaccaagacttgcatgccgaatatgagagcctcagggatctgctaaaatccaaagatgcttctctggtgacaaatgaagatcatcagagaagtcttttggcttttgatcagcagcctgccatgcatcattcctttgcaaatataattggagaacaaggaagcatgccttcagagaggagtgaatgtcgtttagaagcagaccaaagtccgaaaaattctgccatcctacaaaatagagttgattcacttgaattttcattagagtctcaaaaacagatgaactcagacctgcaaaagcagtgtgaagagttggtgcaaatcaaaggagaaatagaagaaaatctcatgaaagcagaacagatgcatcaaagttttgtggctgaaacaagtcagcgcattagtaagttacaggaagacacttctgctcaccagaatgttgttgctgaaaccttaagtgcccttgagaacaaggaaaaagagctgcaacttttaaatgataaggtagaaactgagcaggcagagattcaagaattaaaaaagagcaaccatctacttgaagactctctaaaggagctacaacttttatccgaaaccctaagcttggagaagaaagaaatgagttccatcatttctctaaataaaagggaaattgaagagctgacccaagagaatgggactcttaaggaaattaatgcatccttaaatcaagagaagatgaacttaatccagaaaagtgagagttttgcaaactatatagatgaaagggagaaaagcatttcagagttatctgatcagtacaagcaagaaaaacttattttactacaaagatgtgaagaaaccggaaatgcatatgaggatcttagtcaaaaatacaaagcagcacaggaaaagaattctaaattagaatgcttgctaaatgaatgcactagtctttgtgaaaataggaaaaatgagttggaacagctaaaggaagcatttgcaaaggaacaccaagaattcttaacaaaattagcatttgctgaagaaagaaatcagaatctgatgctagagttggagacagtgcagcaagctctgagatctgagatgacagataaccaaaacaattctaagagcgaggctggtggtttaaagcaagaaatcatgactttaaaggaagaacaaaacaaaatgcaaaaggaagttaatgacttattacaagagaatgaacagctgatgaaggtaatgaagactaaacatgaatgtcaaaatctagaatcagaaccaattaggaactctgtgaaagaaagagagagtgagagaaatcaatgtaattttaaacctcagatggatcttgaagttaaagaaatttctctagatagttataatgcgcagttggtgcaattagaagctatgctaagaaataaggaattaaaacttcaggaaagtgagaaggagaaggagtgcctgcagcatgaattacagacaattagaggagatcttgaaaccagcaatttgcaagacatgcagtcacaagaaattagtggccttaaagactgtgaaatagatgcggaagaaaagtatatttcagggcctcatgagttgtcaacaagtcaaaacgacaatgcacaccttcagtgctctctgcaaacaacaatgaacaagctgaatgagctagagaaaatatgtgaaatactgcaggctgaaaagtatgaactcgtaactgagctgaatgattcaaggtcagaatgtatcacagcaactaggaaaatggcagaagaggtagggaaactactaaatgaagttaaaatattaaatgatgacagtggtcttctccatggtgagttagtggaagacataccaggaggtgaatttggtgaacaaccaaatgaacagcaccctgtgtctttggctccattggacgagagtaattcctacgagcacttgacattgtcagacaaagaagttcaaatgcactttgccgaattgcaagagaaattcttatctttacaaagtgaacacaaaattttacatgatcagcactgtcagatgagctctaaaatgtcagagctgcagacctatgttgactcattaaaggccgaaaatttggtcttgtcaacgaatctgagaaactttcaaggtgacttggtgaaggagatgcagctgggcttggaggaggggctcgttccatccctgtcatcctcttgtgtgcctgacagctctagtcttagcagtttgggagactcctccttttacagagctcttttagaacagacaggagatatgtctcttttgagtaatttagaaggggctgtttcagcaaaccagtgcagtgtagatgaagtattttgcagcagtctgcaggaggagaatctgaccaggaaagaaaccccttcggccccagcgaagggtgttgaagagcttgagtccctctgtgaggtgtaccggcagtccctcgagaagctagaagagaaaatggaaagtcaagggattatgaaaaataaggaaattcaagagctcgagcagttattaagttctgaaaggcaagagcttgactgccttaggaagcagtatttgtcagaaaatgaacagtggcaacagaagctgacaagcgtgactctggagatggagtccaagttggcggcagaaaagaaacagacggaacaactgtcacttgagctggaagtagcacgactccagctacaaggtctggacttaagttctcggtctttgcttggcatcgacacagaagatgctattcaaggccgaaatgagagctgtgacatatcaaaagaacatacttcagaaactacagaaagaacaccaaagcatgatgttcatcagatttgtgataaagatgctcagcaggacctcaatctagacattgagaaaataactgagactggtgcagtgaaacccacaggagagtgctctggggaacagtccccagataccaattatgagcctccaggggaagataaaacccagggctcttcagaatgcatttctgaattgtcattttctggtcctaatgctttggtacctatggatttcctggggaatcaggaagatatccataatcttcaactgcgggtaaaagagacatcaaatgagaatttgagattacttcatgtgatagaggaccgtgacagaaaagttgaaagtttgctaaatgaaatgaaagaattagactcaaaactccatttacaggaggtacaactaatgaccaaaattgaagcatgcatagaattggaaaaaatagttggggaacttaagaaagaaaactcagatttaagtgaaaaattggaatatttttcttgtgatcaccaggagttactccagagagtagaaacttctgaaggcctcaattctgatttagaaatgcatgcagataaatcatcacgtgaagatattggagataatgtggccaaggtgaatgacagctggaaggagagatttcttgatgtggaaaatgagctgagtaggatcagatcggagaaagctagcattgagcatgaagccctctacctggaggctgacttagaggtagttcaaacagagaagctatgtttagaaaaagacaatgaaaataagcagaaggttattgtctgccttgaagaagaactctcagtggtcacaagtgagagaaaccagcttcgtggagaattagatactatgtcaaaaaaaaccacggcactggatcagttgtctgaaaaaatgaaggagaaaacacaagagcttgagtctcatcaaagtgagtgtctccattgcattcaggtggcagaggcagaggtgaaggaaaagacggaactccttcagactttgtcctctgatgtgagtgagctgttaaaagacaaaactcatctccaggaaaagctgcagagtttggaaaaggactcacaggcactgtctttgacaaaatgtgagctggaaaaccaaattgcacaactgaataaagagaaagaattgcttgtcaaggaatctgaaagcctgcaggccagactgagtgaatcagattatgaaaagctgaatgtctccaaggccttggaggccgcactggtggagaaaggtgagttcgcattgaggctgagctcaacacaggaggaagtgcatcagctgagaagaggcatcgagaaactgagagttcgcattgaggccgatgaaaagaagcagctgcacatcgcagagaaactgaaagaacgcgagcgggagaatgattcacttaaggataaagttgagaaccttgaaagggaattgcagatgtcagaagaaaaccaggagctagtgattcttgatgccgagaattccaaagcagaagtagagactctaaaaacacaaatagaagagatggccagaagcctgaaagtttttgaattagaccttgtcacgttaaggtctgaaaaagaaaatctgacaaaacaaatacaagaaaaacaaggtcagttgtcagaactagacaagttactctcttcatttaaaagtctgttagaagaaaaggagcaagcagagatacagatcaaagaagaatctaaaactgcagtggagatgcttcagaatcagttaaaggagctaaatgaggcagtagcagccttgtgtggtgaccaagaaattatgaaggccacagaacagagtctagacccaccaatagaggaagagcatcagctgagaaatagcattgaaaagctgagagcccgcctagaagctgatgaaaagaagcagctctgtgtcttacaacaactgaaggaaagtgagcatcatgcagatttacttaagggtagagtggagaaccttgaaagagagctagagatagccaggacaaaccaagagcatgcagctcttgaggcagagaattccaaaggagaggtagagaccctaaaagcaaaaatagaagggatgacccaaagtctgagaggtctggaattagatgttgttactataaggtcagaaaaagaaaatctgacaaatgaattacaaaaagagcaagagcgaatatctgaattagaaataataaattcatcatttgaaaatattttgcaagaaaaagagcaagagaaagtacagatgaaagaaaaatcaagcactgccatggagatgcttcaaacacaattaaaagagctcaatgagagagtggcagccctgcataatgaccaagaagcctgtaaggccaaagagcagaatcttagtagtcaagtagagtgtcttgaacttgagaaggctcagttgctacaaggccttgatgaggccaaaaataattatattgttttgcaatcttcagtgaatggcctcattcaagaagtagaagatggcaagcagaaactggagaagaaggatgaagaaatcagtagactgaaaaatcaaattcaagaccaagagcagcttgtctctaaactgtcccaggtggaaggagagcaccaactttggaaggagcaaaacttagaactgagaaatctgacagtggaattggagcagaagatccaagtgctacaatccaaaaatgcctctttgcaggacacattagaagtgctgcagagttcttacaagaatctagagaatgagcttgaattgacaaaaatggacaaaatgtcctttgttgaaaaagtaaacaaaatgactgcaaaggaaactgagctgcagagggaaatgcatgagatggcacagaaaacagcagagctgcaagaagaactcagtggagagaaaaataggctagctggagagttgcagttactgttggaagaaataaagagcagcaaagatcaattgaaggagctcacactagaaaatagtgaattgaagaagagcctagattgcatgcacaaagaccaggtggaaaaggaagggaaagtgagagaggaaatagctgaatatcagctacggcttcatgaagctgaaaagaaacaccaggctttgcttttggacacaaacaaacagtatgaagtagaaatccagacataccgagagaaattgacttctaaagaagaatgtctcagttcacagaagctggagatagaccttttaaagtctagtaaagaagagctcaataattcattgaaagctactactcagattttggaagaattgaagaaaaccaagatggacaatctaaaatatgtaaatcagttgaagaaggaaaatgaacgtgcccaggggaaaatgaagttgttgatcaaatcctgtaaacagctggaagaggaaaaggagatactgcagaaagaactctctcaacttcaagctgcacaggagaagcagaaaacaggtactgttatggataccaaggtcgatgaattaacaactgagatcaaagaactgaaagaaactcttgaagaaaaaaccaaggaggcagatgaatacttggataagtactgttccttgcttataagccatgaaaagttagagaaagctaaagagatgttagagacacaagtggcccatctgtgttcacagcaatctaaacaagattcccgagggtctcctttgctaggtccagttgttccaggaccatctccaatcccttctgttactgaaaagaggttatcatctggccaaaataaagcttcaggcaagaggcaaagatccagtggaatatgggagaatggtagaggaccaacacctgctaccccagagagcttttctaaaaaaagcaagaaagcagtcatgagtggtattcaccctgcagaagacacggaaggtactgagtttgagccagagggacttccagaagttgtaaagaaagggtttgctgacatcccgacaggaaagactagcccatatatcctgcgaagaacaaccatggcaactcggaccagcccccgcctggctgcacagaagttagcgctatccccactgagtctcggcaaagaaaatcttgcagagtcctccaaaccaacagctggtggcagcagatcacaaaaggtcaaagttgctcagcggagcccagtagattcaggcaccatcctccgagaacccaccacgaaatccgtcccagtcaataatcttcctgagagaagtccgactgacagccccagagagggcctgagggtcaagcgaggccgacttgtccccagccccaaagctggactggagtccaacggcagtgagaactgtaaggtccagtgaaggcactttgtgtgtcagtacccctgggaggtgccagtcattgaatagataaggctgtgcctacaggacttctctttagtcagggcatgctttattagtgaggagaaaacaattccttagaagtcttaaatatattgtactctttagatctcccatgtgtaggtattgaaaaagtttggaagcactgatcacctgttagcattgccattcctctactgcaatgtaaatagtataaagctatgtatataaagctttttggtaatatgttacaattaaaatgacaagcactatatcacaatctctgtttgtatgtgggttttacactaaaaaaatgcaaaacacattttattcttctaattaacagctcctaggaaaatgtagacttttgctttatgatattctatctgtagtatgaggcatggaatagttttgtatcgggaatttctcagagctgagtaaaatgaaggaaaagcatgttatgtgtttttaaggaaaatgtgcacacatatacatgtaggagtgtttatctttctcttacaatctgttttagacatctttgcttatgaaacctgtacatatgtgtgtgtgggtatgtgtttatttccagtgagggctgcaggcttcctagaggtgtgctataccatgcgtctgtcgttgtgcttttttctgtttttagaccaattttttacagttctttggtaagcattgtcgtatctggtgatggattaacatatagcctttgttttctaataaaatagtcgccttcgttttctgtaaaaaaaaaaaaaaaaaaaaaa

SEQ ID NO: 195 - DNA, 5753 bp, Homo sapiens
gattggctggtctgcttcgggcgggctaaaggaaggttcaagtggagctctcctaaccgacgcgcgtctgtggagaagcggcttggtcgggggtggtctcgtggggtcctgcctgtttagtcgctttcagggttcttgagccccttcacgaccgtcaccatggaagtgtcaccattgcagcctgtaaatgaaaatatgcaagtcaacaaaataaagaaaaatgaagatgctaagaaaagactgtctgttgaaagaatctatcaaaagaaaacacaattggaacatattttgctccgcccagacacctacattggttctgtggaattagtgacccagcaaatgtgggtttacgatgaagatgttggcattaactatagggaagtcacttttgttcctggtttgtacaaaatctttgatgagattctagttaatgctgcggacaacaaacaaagggacccaaaaatgtcttgtattagagtcacaattgatccggaaaacaatttaattagtatatggaataatggaaaaggtattcctgttgttgaacacaaagttgaaaagatgtatgtcccagctctcatatttggacagctcctaacttctagtaactatgatgatgatgaaaagaaagtgacaggtggtcgaaatggctatggagccaaattgtgtaacatattcagtaccaaatttactgtggaaacagccagtagagaatacaagaaaatgttcaaacagacatggatggataatatgggaagagctggtgagatggaactcaagcccttcaatggagaagattatacatgtatcacctttcagcctgatttgtctaagtttaaaatgcaaagcctggacaaagatattgttgcactaatggtcagaagagcatatgatattgctggatccaccaaagatgtcaaagtctttcttaatggaaataaactgccagtaaaaggatttcgtagttatgtggacatgtatttgaaggacaagttggatgaaactggtaactccttgaaagtaatacatgaacaagtaaaccacaggtgggaagtgtgtttaactatgagtgaaaaaggctttcagcaaattagctttgtcaacagcattgctacatccaagggtggcagacatgttgattatgtagctgatcagattgtgactaaacttgttgatgttgtgaagaagaagaacaagggtggtgttgcagtaaaagcacatcaggtgaaaaatcacatgtggatttttgtaaatgccttaattgaaaacccaacctttgactctcagacaaaagaaaacatgactttacaacccaagagctttggatcaacatgccaattgagtgaaaaatttatcaaagctgccattggctgtggtattgtagaaagcatactaaactgggtgaagtttaaggcccaagtccagttaaacaagaagtgttcagctgtaaaacataatagaatcaagggaattcccaaactcgatgatgccaatgatgcagggggccgaaactccactgagtgtacgcttatcctgactgagggagattcagccaaaactttggctgtttcaggccttggtgtggttgggagagacaaatatggggttttccctcttagaggaaaaatactcaatgttcgagaagcttctcataagcagatcatggaaaatgctgagattaacaatatcatcaagattgtgggtcttcagtacaagaaaaactatgaagatgaagattcattgaagacgcttcgttatgggaagataatgattatgacagatcaggaccaagatggttcccacatcaaaggcttgctgattaattttatccatcacaactggccctctcttctgcgacatcgttttctggaggaatttatcactcccattgtaaaggtatctaaaaacaagcaagaaatggcattttacagccttcctgaatttgaagagtggaagagttctactccaaatcataaaaaatggaaagtcaaatattacaaaggtttgggcaccagcacatcaaaggaagctaaagaatactttgcagatatgaaaagacatcgtatccagttcaaatattctggtcctgaagatgatgctgctatcagcctggcctttagcaaaaaacagatagatgatcgaaaggaatggttaactaatttcatggaggatagaagacaacgaaagttacttgggcttcctgaggattacttgtatggacaaactaccacatatctgacatataatgacttcatcaacaaggaacttatcttgttctcaaattctgataacgagagatctatcccttctatggtggatggtttgaaaccaggtcagagaaaggttttgtttacttgcttcaaacggaatgacaagcgagaagtaaaggttgcccaattagctggatcagtggctgaaatgtcttcttatcatcatggtgagatgtcactaatgatgaccattatcaatttggctcagaattttgtgggtagcaataatctaaacctcttgcagcccattggtcagtttggtaccaggctacatggtggcaaggattctgctagtccacgatacatctttacaatgctcagctctttggctcgattgttatttccaccaaaagatgatcacacgttgaagtttttatatgatgacaaccagcgtgttgagcctgaatggtacattcctattattcccatggtgctgataaatggtgctgaaggaatcggtactgggtggtcctgcaaaatccccaactttgatgtgcgtgaaattgtaaataacatcaggcgtttgatggatggagaagaacctttgccaatgcttccaagttacaagaacttcaagggtactattgaagaactggctccaaatcaatatgtgattagtggtgaagtagctattcttaattctacaaccattgaaatctcagagcttcccgtcagaacatggacccagacatacaaagaacaagttctagaacccatgttgaatggcaccgagaagacacctcctctcataacagactatagggaataccatacagataccactgtgaaatttgttgtgaagatgactgaagaaaaactggcagaggcagagagagttggactacacaaagtcttcaaactccaaactagtctcacatgcaactctatggtgctttttgaccacgtaggctgtttaaagaaatatgacacggtgttggatattctaagagacttttttgaactcagacttaaatattatggattaagaaaagaatggctcctaggaatgcttggtgctgaatctgctaaactgaataatcaggctcgctttatcttagagaaaatagatggcaaaataatcattgaaaataagcctaagaaagaattaattaaagttctgattcagaggggatatgattcggatcctgtgaaggcctggaaagaagcccagcaaaaggttccagatgaagaagaaaatgaagagagtgacaacgaaaaggaaactgaaaagagtgactccgtaacagattctggaccaaccttcaactatcttcttgatatgcccctttggtatttaaccaaggaaaagaaagatgaactctgcaggctaagaaatgaaaaagaacaagagctggacacattaaaaagaaagagtccatcagatttgtggaaagaagacttggctacatttattgaagaattggaggctgttgaagccaaggaaaaacaagatgaacaagtcggacttcctgggaaaggggggaaggccaaggggaaaaaaacacaaatggctgaagttttgccttctccgcgtggtcaaagagtcattccacgaataaccatagaaatgaaagcagaggcagaaaagaaaaataaaaagaaaattaagaatgaaaatactgaaggaagccctcaagaagatggtgtggaactagaaggcctaaaacaaagattagaaaagaaacagaaaagagaaccaggtacaaagacaaagaaacaaactacattggcatttaagccaatcaaaaaaggaaagaagagaaatccctggtctgattcagaatcagataggagcagtgacgaaagtaattttgatgtccctccacgagaaacagagccacggagagcagcaacaaaaacaaaattcacaatggatttggattcagatgaagatttctcagattttgatgaaaaaactgatgatgaagattttgtcccatcagatgctagtccacctaagaccaaaacttccccaaaacttagtaacaaagaactgaaaccacagaaaagtgtcgtgtcagaccttgaagctgatgatgttaagggcagtgtaccactgtcttcaagccctcctgctacacatttcccagatgaaactgaaattacaaacccagttcctaaaaagaatgtgacagtgaagaagacagcagcaaaaagtcagtcttccacctccactaccggtgccaaaaaaagggctgccccaaaaggaactaaaagggatccagctttgaattctggtgtctctcaaaagcctgatcctgccaaaaccaagaatcgccgcaaaaggaagccatccacttctgatgattctgactctaattttgagaaaattgtttcgaaagcagtcacaagcaagaaatccaagggggagagtgatgacttccatatggactttgactcagctgtggctcctcgggcaaaatctgtacgggcaaagaaacctataaagtacctggaagagtcagatgaagatgatctgttttaaaatgtgaggcgattattttaagtaattatcttaccaagcccaagactggttttaaagttacctgaagctcttaacttcctcccctctgaatttagtttggggaaggtgtttttagtacaagacatcaaagtgaagtaaagcccaagtgttctttagctttttataatactgtctaaatagtgaccatctcatgggcattgttttcttctctgctttgtctgtgttttgagtctgctttcttttgtctttaaaacctgatttttaagttcttctgaactgtagaaatagctatctgatcacttcagcgtaaagcagtgtgtttattaaccatccactaagctaaaactagagcagtttgatttaaaagtgtcactcttcctccttttctactttcagtagatatgagatagagcataattatctgttttatcttagttttatacataatttaccatcagatagaactttatggttctagtacagatactctactacactcagcctcttatgtgccaagtttttctttaagcaatgagaaattgctcatgttcttcatcttctcaaatcatcagaggccgaagaaaaacactttggctgtgtctataacttgacacagtcaatagaatgaagaaaattagagtagttatgtgattatttcagctcttgacctgtcccctctggctgcctctgagtctgaatctcccaaagagagaaaccaatttctaagaggactggattgcagaagactcggggacaacatttgatccaagatcttaaatgttatattgataaccatgctcagcaatgagctattagattcattttgggaaatctccataatttcaatttgtaaactttgttaagacctgtctacattgttatatgtgtgtgacttgagtaatgttatcaacgtttttgtaaatatttactatgtttttctattagctaaattccaacaattttgtactttaataaaatgttctaaacattgcaaccca

SEQ ID NO: 196 - DNA, 1603 bp, Homo sapiens
cgggacggccgcgggaaaaggcgcgcggaaggggtcctgccaccgcgccacttggcctgcctccgtcccgccgcgccacttggcctgcctccgtcccgccgcgccacttcgcctgcctccgtcccccgcccgccgcgccatgcctgtggccggctcggagctgccgcgccggcccttgccccccgccgcacaggagcgggacgccgagccgcgtccgccgcacggggagctgcagtacctggggcagatccaacacatcctccgctgcggcgtcaggaaggacgaccgcacgggcaccggcaccctgtcggtattcggcatgcaggcgcgctacagcctgagagatgaattccctctgctgacaaccaaacgtgtgttctggaagggtgttttggaggagttgctgtggtttatcaagggatccacaaatgctaaagagctgtcttccaagggagtgaaaatctgggatgccaatggatcccgagactttttggacagcctgggattctccaccagagaagaaggggacttgggcccagtttatggcttccagtggaggcattttggggcagaatacagagatatggaatcagattattcaggacagggagttgaccaactgcaaagagtgattgacaccatcaaaaccaaccctgacgacagaagaatcatcatgtgcgcttggaatccaagagatcttcctctgatggcgctgcctccatgccatgccctctgccagttctatgtggtgaacagtgagctgtcctgccagctgtaccagagatcgggagacatgggcctcggtgtgcctttcaacatcgccagctacgccctgctcacgtacatgattgcgcacatcacgggcctgaagccaggtgactttatacacactttgggagatgcacatatttacctgaatcacatcgagccactgaaaattcagcttcagcgagaacccagacctttcccaaagctcaggattcttcgaaaagttgagaaaattgatgacttcaaagctgaagactttcagattgaagggtacaatccgcatccaactattaaaatggaaatggctgtttagggtgctttcaaaggagctcgaaggatattgtcagtctttaggggttgggctggatgccgaggtaaaagttctttttgctctaaaagaaaaaggaactaggtcaaaaatctgtccgtgacctatcagttattaatttttaaggatgttgccactggcaaatgtaactgtgccagttctttccataataaaaggctttgagttaactcactgagggtatctgacaatgctgaggttatgaacaaagtgaggagaatgaaatgtatgtgctcttagcaaaaacatgtatgtgcatttcaatcccacgtacttataaagaaggttggtgaatttcacaagctatttttggaatatttttagaatattttaagaatttcacaagctattccctcaaatctgagggagctgagtaacaccatcgatcatgatgtagagtgtggttatgaactttaaagttatagttgttttatatgttgctataataaagaagtgttctgcattcgtcaaaaaaaaaaaaaaaaaaaa

SEQ ID NO: 197 - DNA, 2177 bp, Homo sapiens
cgaacgccttcgcgcgatcgccctggaaacgcattctctgcgaccggcagccgccaatgggaagggagtgagtgccacgaacaggccaataaggagggagcagtgcggggtttaaatctgaggctaggctggctcttctcggcgtgctgcggcggaacggctgttggtttctgctgggtgtaggtccttggctggtcgggcctccggtgttctgcttctccccgctgagctgctgcctggtgaagaggaagccatggcgctccgagtcaccaggaactcgaaaattaatgctgaaaataaggcgaagatcaacatggcaggcgcaaagcgcgttcctacggcccctgctgcaacctccaagcccggactgaggccaagaacagctcttggggacattggtaacaaagtcagtgaacaactgcaggccaaaatgcctatgaagaaggaagcaaaaccttcagctactggaaaagtcattgataaaaaactaccaaaacctcttgaaaaggtacctatgctggtgccagtgccagtgtctgagccagtgccagagccagaacctgagccagaacctgagcctgttaaagaagaaaaactttcgcctgagcctattttggttgatactgcctctccaagcccaatggaaacatctggatgtgcccctgcagaagaagacctgtgtcaggctttctctgatgtaattcttgcagtaaatgatgtggatgcagaagatggagctgatccaaacctttgtagtgaatatgtgaaagatatttatgcttatctgagacaacttgaggaagagcaagcagtcagaccaaaatacctactgggtcgggaagtcactggaaacatgagagccatcctaattgactggctagtacaggttcaaatgaaattcaggttgttgcaggagaccatgtacatgactgtctccattattgatcggttcatgcagaataattgtgtgcccaagaagatgctgcagctggttggtgtcactgccatgtttattgcaagcaaatatgaagaaatgtaccctccagaaattggtgactttgcttttgtgactgacaacacttatactaagcaccaaatcagacagatggaaatgaagattctaagagctttaaactttggtctgggtcggcctctacctttgcacttccttcggagagcatctaagattggagaggttgatgtcgagcaacatactttggccaaatacctgatggaactaactatgttggactatgacatggtgcactttcctccttctcaaattgcagcaggagctttttgcttagcactgaaaattctggataatggtgaatggacaccaactctacaacattacctgtcatatactgaagaatctcttcttccagttatgcagcacctggctaagaatgtagtcatggtaaatcaaggacttacaaagcacatgactgtcaagaacaagtatgccacatcgaagcatgctaagatcagcactctaccacagctgaattctgcactagttcaagatttagccaaggctgtggcaaaggtgtaacttgtaaacttgagttggagtactatatttacaaataaaattggcaccatgtgccatctgtacatattactgttgcatttacttttaataaagcttgtggccccttttacttttttatagcttaactaatttgaatgtggttacttcctactgtagggtagcggaaaagttgtcttaaaaggtatggtggggatatttttaaaaactccttttggtttacctggggatccaattgatgtatatgtttatatactgggttcttgttttatatacctggcttttactttattaatatgagttactgaaggtgatggaggtatttgaaaattttacttccataggacatactgcatgtaagccaagtcatggagaatctgctgcatagctctattttaaagtaaaagtctaccaccgaatccctagtccccctgttttctgtttcttcttgtgattgctgccataattctaagttatttacttttaccactatttaagttatcaactttagctagtatcttcaaactttcactttgaaaaatgagaattttatattctaagccagttttcattttggttttgtgttttggttaataaaacaatactcaaatacaaaaaaaaaaaa

SEQ ID NO: 198 - DNA, 12507 bp, Homo sapiens
taccgggcggaggtgagcgcggcgccggctcctcctgcggcggactttgggtgcgacttgacgagcggtggttcgacaagtggccttgcgggccggatcgtcccagtggaagagttgtaaatttgcttctggccttcccctacggattatacctggccttcccctacggattatactcaacttactgtttagaaaatgtggcccacgagacgcctggttactatcaaaaggagcggggtcgacggtccccactttcccctgagcctcagcacctgcttgtttggaaggggtattgaatgtgacatccgtatccagcttcctgttgtgtcaaaacaacattgcaaaattgaaatccatgagcaggaggcaatattacataatttcagttccacaaatccaacacaagtaaatgggtctgttattgatgagcctgtacggctaaaacatggagatgtaataactattattgatcgttccttcaggtatgaaaatgaaagtcttcagaatggaaggaagtcaactgaatttccaagaaaaatacgtgaacaggagccagcacgtcgtgtctcaagatctagcttctcttctgaccctgatgagaaagctcaagattccaaggcctattcaaaaatcactgaaggaaaagtttcaggaaatcctcaggtacatatcaagaatgtcaaagaagacagtaccgcagatgactcaaaagacagtgttgctcagggaacaactaatgttcattcctcagaacatgctggacgtaatggcagaaatgcagctgatcccatttctggggattttaaagaaatttccagcgttaaattagtgagccgttatggagaattgaagtctgttcccactacacaatgtcttgacaatagcaaaaaaaatgaatctcccttttggaagctttatgagtcagtgaagaaagagttggatgtaaaatcacaaaaagaaaatgtcctacagtattgtagaaaatctggattacaaactgattacgcaacagagaaagaaagtgctgatggtttacagggggagacccaactgttggtctcgcgtaagtcaagaccaaaatctggtgggagcggccacgctgtggcagagcctgcttcacctgaacaagagcttgaccagaacaaggggaagggaagagacgtggagtctgttcagactcccagcaaggctgtgggcgccagctttcctctctatgagccggctaaaatgaagacccctgtacaatattcacagcaacaaaattctccacaaaaacataagaacaaagacctgtatactactggtagaagagaatctgtgaatctgggtaaaagtgaaggcttcaaggctggtgataaaactcttactcccaggaagctttcaactagaaatcgaacaccagctaaagttgaagatgcagctgactctgccactaagccagaaaatctctcttccaaaaccagaggaagtattcctacagatgtggaagttctgcctacggaaactgaaattcacaatgagccatttttaactctgtggctcactcaagttgagaggaagatccaaaaggattccctcagcaagcctgagaaattgggcactacagctggacagatgtgctctgggttacctggtcttagttcagttgatatcaacaactttggtgattccattaatgagagtgagggaatacctttgaaaagaaggcgtgtgtcctttggtgggcacctaagacctgaactatttgatgaaaacttgcctcctaatacgcctctcaaaaggggagaagccccaaccaaaagaaagtctctggtaatgcacactccacctgtcctgaagaaaatcatcaaggaacagcctcaaccatcaggaaaacaagagtcaggttcagaaatccatgtggaagtgaaggcacaaagcttggttataagccctccagctcctagtcctaggaaaactccagttgccagtgatcaacgccgtaggtcctgcaaaacagcccctgcttccagcagcaaatctcagacagaggttcctaagagaggagggagaaagagtggcaacctgccttcaaagagagtgtctatcagccgaagtcaacatgatattttacagatgatatgttccaaaagaagaagtggtgcttcggaagcaaatctgattgttgcaaaatcatgggcagatgtagtaaaacttggtgcaaaacaaacacaaactaaagtcataaaacatggtcctcaaaggtcaatgaacaaaaggcaaagaagacctgctactccaaagaagcctgtgggcgaagttcacagtcaatttagtacaggccacgcaaactctccttgtaccataataatagggaaagctcatactgaaaaagtacatgtgcctgctcgaccctacagagtgctcaacaacttcatttccaaccaaaaaatggactttaaggaagatctttcaggaatagctgaaatgttcaagaccccagtgaaggagcaaccgcagttgacaagcacatgtcacatcgctatttcaaattcagagaatttgcttggaaaacagtttcaaggaactgattcaggagaagaacctctgctccccacctcagagagttttggaggaaatgtgttcttcagtgcacagaatgcagcaaaacagccatctgataaatgctctgcaagccctcccttaagacggcagtgtattagagaaaatggaaacgtagcaaaaacgcccaggaacacctacaaaatgacttctctggagacaaaaacttcagatactgagacagagccttcaaaaacagtatccactgcaaacaggtcaggaaggtctacagagttcaggaatatacagaagctacctgtggaaagtaagagtgaagaaacaaatacagaaattgttgagtgcatcctaaaaagaggtcagaaggcaacactactacaacaaaggagagaaggagagatgaaggaaatagaaagaccttttgagacatataaggaaaatattgaattaaaagaaaacgatgaaaagatgaaagcaatgaagagatcaagaacttgggggcagaaatgtgcaccaatgtctgacctgacagacctcaagagcttgcctgatacagaactcatgaaagacacggcacgtggccagaatctcctccaaacccaagatcatgccaaggcaccaaagagtgagaaaggcaaaatcactaaaatgccctgccagtcattacaaccagaaccaataaacaccccaacacacacaaaacaacagttgaaggcatccctggggaaagtaggtgtgaaagaagagctcctagcagtcggcaagttcacacggacgtcaggggagaccacgcacacgcacagagagccagcaggagatggcaagagcatcagaacgtttaaggagtctccaaagcagatcctggacccagcagcccgtgtaactggaatgaagaagtggccaagaacgcctaaggaagaggcccagtcactagaagacctggctggcttcaaagagctcttccagacaccaggtccctctgaggaatcaatgactgatgagaaaactaccaaaatagcctgcaaatctccaccaccagaatcagtggacactccaacaagcacaaagcaatggcctaagagaagtctcaggaaagcagatgtagaggaagaattcttagcactcaggaaactaacaccatcagcagggaaagccatgcttacgcccaaaccagcaggaggtgatgagaaagacattaaagcatttatgggaactccagtgcagaaactggacctggcaggaactttacctggcagcaaaagacagctacagactcctaaggaaaaggcccaggctctagaagacctggctggctttaaagagctcttccagactcctggtcacaccgaggaattagtggctgctggtaaaaccactaaaataccctgcgactctccacagtcagacccagtggacaccccaacaagcacaaagcaacgacccaagagaagtatcaggaaagcagatgtagagggagaactcttagcgtgcaggaatctaatgccatcagcaggcaaagccatgcacacgcctaaaccatcagtaggtgaagagaaagacatcatcatatttgtgggaactccagtgcagaaactggacctgacagagaacttaaccggcagcaagagacggccacaaactcctaaggaagaggcccaggctctggaagacctgactggctttaaagagctcttccagacccctggtcatactgaagaagcagtggctgctggcaaaactactaaaatgccctgcgaatcttctccaccagaatcagcagacaccccaacaagcacaagaaggcagcccaagacacctttggagaaaagggacgtacagaaggagctctcagccctgaagaagctcacacagacatcaggggaaaccacacacacagataaagtaccaggaggtgaggataaaagcatcaacgcgtttagggaaactgcaaaacagaaactggacccagcagcaagtgtaactggtagcaagaggcacccaaaaactaaggaaaaggcccaacccctagaagacctggctggcttgaaagagctcttccagacaccagtatgcactgacaagcccacgactcacgagaaaactaccaaaatagcctgcagatcacaaccagacccagtggacacaccaacaagctccaagccacagtccaagagaagtctcaggaaagtggacgtagaagaagaattcttcgcactcaggaaacgaacaccatcagcaggcaaagccatgcacacacccaaaccagcagtaagtggtgagaaaaacatctacgcatttatgggaactccagtgcagaaactggacctgacagagaacttaactggcagcaagagacggctacaaactcctaaggaaaaggcccaggctctagaagacctggctggctttaaagagctcttccagacacgaggtcacactgaggaatcaatgactaacgataaaactgccaaagtagcctgcaaatcttcacaaccagacccagacaaaaacccagcaagctccaagcgacggctcaagacatccctggggaaagtgggcgtgaaagaagagctcctagcagttggcaagctcacacagacatcaggagagactacacacacacacacagagccaacaggagatggtaagagcatgaaagcatttatggagtctccaaagcagatcttagactcagcagcaagtctaactggcagcaagaggcagctgagaactcctaagggaaagtctgaagtccctgaagacctggccggcttcatcgagctcttccagacaccaagtcacactaaggaatcaatgactaacgaaaaaactaccaaagtatcctacagagcttcacagccagacctagtggacaccccaacaagctccaagccacagcccaagagaagtctcaggaaagcagacactgaagaagaatttttagcatttaggaaacaaacgccatcagcaggcaaagccatgcacacacccaaaccagcagtaggtgaagagaaagacatcaacacgtttttgggaactccagtgcagaaactggaccagccaggaaatttacctggcagcaatagacggctacaaactcgtaaggaaaaggcccaggctctagaagaactgactggcttcagagagcttttccagacaccatgcactgataaccccacgactgatgagaaaactaccaaaaaaatactctgcaaatctccgcaatcagacccagcggacaccccaacaaacacaaagcaacggcccaagagaagcctcaagaaagcagacgtagaggaagaatttttagcattcaggaaactaacaccatcagcaggcaaagccatgcacacgcctaaagcagcagtaggtgaagagaaagacatcaacacatttgtggggactccagtggagaaactggacctgctaggaaatttacctggcagcaagagacggccacaaactcctaaagaaaaggccaaggctctagaagatctggctggcttcaaagagctcttccagacaccaggtcacactgaggaatcaatgaccgatgacaaaatcacagaagtatcctgcaaatctccacaaccagacccagtcaaaaccccaacaagctccaagcaacgactcaagatatccttggggaaagtaggtgtgaaagaagaggtcctaccagtcggcaagctcacacagacgtcagggaagaccacacagacacacagagagacagcaggagatggaaagagcatcaaagcgtttaaggaatctgcaaagcagatgctggacccagcaaactatggaactgggatggagaggtggccaagaacacctaaggaagaggcccaatcactagaagacctggccggcttcaaagagctcttccagacaccagaccacactgaggaatcaacaactgatgacaaaactaccaaaatagcctgcaaatctccaccaccagaatcaatggacactccaacaagcacaaggaggcggcccaaaacacctttggggaaaagggatatagtggaagagctctcagccctgaagcagctcacacagaccacacacacagacaaagtaccaggagatgaggataaaggcatcaacgtgttcagggaaactgcaaaacagaaactggacccagcagcaagtgtaactggtagcaagaggcagccaagaactcctaagggaaaagcccaacccctagaagacttggctggcttgaaagagctcttccagacaccaatatgcactgacaagcccacgactcatgagaaaactaccaaaatagcctgcagatctccacaaccagacccagtgggtaccccaacaatcttcaagccacagtccaagagaagtctcaggaaagcagacgtagaggaagaatccttagcactcaggaaacgaacaccatcagtagggaaagctatggacacacccaaaccagcaggaggtgatgagaaagacatgaaagcatttatgggaactccagtgcagaaattggacctgccaggaaatttacctggcagcaaaagatggccacaaactcctaaggaaaaggcccaggctctagaagacctggctggcttcaaagagctcttccagacaccaggcactgacaagcccacgactgatgagaaaactaccaaaatagcctgcaaatctccacaaccagacccagtggacaccccagcaagcacaaagcaacggcccaagagaaacctcaggaaagcagacgtagaggaagaatttttagcactcaggaaacgaacaccatcagcaggcaaagccatggacacaccaaaaccagcagtaagtgatgagaaaaatatcaacacatttgtggaaactccagtgcagaaactggacctgctaggaaatttacctggcagcaagagacagccacagactcctaaggaaaaggctgaggctctagaggacctggttggcttcaaagaactcttccagacaccaggtcacactgaggaatcaatgactgatgacaaaatcacagaagtatcctgtaaatctccacagccagagtcattcaaaacctcaagaagctccaagcaaaggctcaagatacccctggtgaaagtggacatgaaagaagagcccctagcagtcagcaagctcacacggacatcaggggagactacgcaaacacacacagagccaacaggagatagtaagagcatcaaagcgtttaaggagtctccaaagcagatcctggacccagcagcaagtgtaactggtagcaggaggcagctgagaactcgtaaggaaaaggcccgtgctctagaagacctggttgacttcaaagagctcttctcagcaccaggtcacactgaagagtcaatgactattgacaaaaacacaaaaattccctgcaaatctcccccaccagaactaacagacactgccacgagcacaaagagatgccccaagacacgtcccaggaaagaagtaaaagaggagctctcagcagttgagaggctcacgcaaacatcagggcaaagcacacacacacacaaagaaccagcaagcggtgatgagggcatcaaagtattgaagcaacgtgcaaagaagaaaccaaacccagtagaagaggaacccagcaggagaaggccaagagcacctaaggaaaaggcccaacccctggaagacctggccggcttcacagagctctctgaaacatcaggtcacactcaggaatcactgactgctggcaaagccactaaaataccctgcgaatctcccccactagaagtggtagacaccacagcaagcacaaagaggcatctcaggacacgtgtgcagaaggtacaagtaaaagaagagccttcagcagtcaagttcacacaaacatcaggggaaaccacggatgcagacaaagaaccagcaggtgaagataaaggcatcaaagcattgaaggaatctgcaaaacagacaccggctccagcagcaagtgtaactggcagcaggagacggccaagagcacccagggaaagtgcccaagccatagaagacctagctggcttcaaagacccagcagcaggtcacactgaagaatcaatgactgatgacaaaaccactaaaataccctgcaaatcatcaccagaactagaagacaccgcaacaagctcaaagagacggcccaggacacgtgcccagaaagtagaagtgaaggaggagctgttagcagttggcaagctcacacaaacctcaggggagaccacgcacaccgacaaagagccggtaggtgagggcaaaggcacgaaagcatttaagcaacctgcaaagcggaagctggacgcagaagatgtaattggcagcaggagacagccaagagcacctaaggaaaaggcccaacccctggaagatctggccagcttccaagagctctctcaaacaccaggccacactgaggaactggcaaatggtgctgctgatagctttacaagcgctccaaagcaaacacctgacagtggaaaacctctaaaaatatccagaagagttcttcgggcccctaaagtagaacccgtgggagacgtggtaagcaccagagaccctgtaaaatcacaaagcaaaagcaacacttccctgcccccactgcccttcaagaggggaggtggcaaagatggaagcgtcacgggaaccaagaggctgcgctgcatgccagcaccagaggaaattgtggaggagctgccagccagcaagaagcagagggttgctcccagggcaagaggcaaatcatccgaacccgtggtcatcatgaagagaagtttgaggacttctgcaaaaagaattgaacctgcggaagagctgaacagcaacgacatgaaaaccaacaaagaggaacacaaattacaagactcggtccctgaaaataagggaatatccctgcgctccagacgccaaaataagactgaggcagaacagcaaataactgaggtctttgtattagcagaaagaatagaaataaacagaaatgaaaagaagcccatgaagacctccccagagatggacattcagaatccagatgatggagcccggaaacccatacctagagacaaagtcactgagaacaaaaggtgcttgaggtctgctagacagaatgagagctcccagcctaaggtggcagaggagagcggagggcagaagagtgcgaaggttctcatgcagaatcagaaagggaaaggagaagcaggaaattcagactccatgtgcctgagatcaagaaagacaaaaagccagcctgcagcaagcactttggagagcaaatctgtgcagagagtaacgcggagtgtcaagaggtgtgcagaaaatccaaagaaggctgaggacaatgtgtgtgtcaagaaaataagaaccagaagtcatagggacagtgaagatatttgacagaaaaatcgaactgggaaaaatataataaagttagttttgtgataagttctagtgcagtttttgtcataaattacaagtgaattctgtaagtaaggctgtcagtctgcttaagggaagaaaactttggatttgctgggtctgaatcggcttcataaactccactgggagcactgctgggctcctggactgagaatagttgaacaccgggggctttgtgaaggagtctgggccaaggtttgccctcagctttgcagaatgaagccttgaggtctgtcaccacccacagccaccctacagcagccttaactgtgacacttgccacactgtgtcgtcgtttgtttgcctatgtcctccagggcacggtggcaggaacaactatcctcgtctgtcccaacactgagcaggcactcggtaaacacgaatgaatggatgagcgcacggatgaatggagcttacaagatctgtctttccaatggccgggggcatttggtccccaaattaaggctattggacatctgcacaggacagtcctatttttgatgtcctttcctttctgaaaataaagttttgtgctttggagaatgactcgtgagcacatctttagggaccaagagtgactttctgtaaggagtgactcgtggcttgccttggtctcttgggaatacttttctaactagggttgctctcacctgagacattctccacccgcggaatctcagggtcccaggctgtgggccatcacgacctcaaactggctcctaatctccagctttcctgtcattgaaagcttcggaagtttactggctctgctcccgcctgttttctttctgactctatctggcagcccgatgccacccagtacaggaagtgacaccagtactctgtaaagcatcatcatccttggagagactgagcactcagcaccttcagccacgatttcaggatcgcttccttgtgagccgctgcctccgaaatctcctttgaagcccagacatctttctccagcttcagacttgtagatataactcgttcatcttcatttactttccactttgccccctgtcctctctgtgttccccaaatcagagaatagcccgccatcccccaggtcacctgtctggattcctccccattcacccaccttgccaggtgcaggtgaggatggtgcaccagacagggtagctgtcccccaaaatgtgccctgtgcgggcagtgccctgtctccacgtttgtttccccagtgtctggcggggagccaggtgacatcataaatacttgctgaatgaatgcagaaatcagcggtactgacttgtactatattggctgccatgatagggttctcacagcgtcatccatgatcgtaagggagaatgacattctgcttgagggagggaatagaaaggggcagggaggggacatctgagggcttcacagggctgcaaagggtacagggattgcaccagggcagaacaggggagggtgttcaaggaagagtggctcttagcagaggcactttggaaggtgtgaggcataaatgcttccttctacgtaggccaacctcaaaactttcagtaggaatgttgctatgatcaagttgttctaacactttagacttagtagtaattatgaacctcacatagaaaaatttcatccagccatatgcctgtggagtggaatattctgtttagtagaaaaatcctttagagttcagctctaaccagaaatcttgctgaagtatgtcagcaccttttctcaccctggtaagtacagtatttcaagagcacgctaagggtggttttcattttacagggctgttgatgatgggttaaaaatgttcatttaagggctacccccgtgtttaatagatgaacaccacttctacacaaccctccttggtactgggggagggagagatctgacaaatactgcccattcccctaggctgactggatttgagaacaaatacccacccatttccaccatggtatggtaacttctctgagcttcagtttccaagtgaatttccatgtaataggacattcccattaaatacaagctgtttttactttttcgcctcccagggcctgtgggatctggtcccccagcctctcttgggctttcttacactaactctgtacctaccatctcctgcctcccttaggcaggcacctccaaccaccacacactccctgctgttttccctgcctggaactttccctcctgccccaccaagatcatttcatccagtcctgagctcagcttaagggaggcttcttgcctgtgggttccctcacccccatgcctgtcctccaggctggggcaggttcttagtttgcctggaattgttctgtacctctttgtagcacgtagtgttgtggaaactaagccactaattgagtttctggctcccctcctggggttgtaagttttgttcattcatgagggccgactgcatttcctggttactctatcccagtgaccagccacaggagatgtccaataaagtatgtgatgaaatggtcttaaaaaaaaaaaaaa

SEQ ID NO: 199 - DNA, 1318 bp, Homo sapiens
agcccagtcgccgccgcccgcccacaaagccacaggcaggtgcaggcgcagccgcggcgagagcgtatggagccgagccgttagcgcgcgccgtcggtgagtcagtccgtccgtccgtccgtccgtcggggcgccgcagctcccgccaggcccagcggccccggcccctcgtctccccgcacccggagccacccggtggagcgggccttgccgcggcagccatgtccatgggcctggagatcacgggcaccgcgctggccgtgctgggctggctgggcaccatcgtgtgctgcgcgttgcccatgtggcgcgtgtcggccttcatcggcagcaacatcatcacgtcgcagaacatctgggagggcctgtggatgaactgcgtggtgcagagcaccggccagatgcagtgcaaggtgtacgactcgctgctggcactgccacaggaccttcaggcggcccgcgccctcatcgtggtggccatcctgctggccgccttcgggctgctagtggcgctggtgggcgcccagtgcaccaactgcgtgcaggacgacacggccaaggccaagatcaccatcgtggcaggcgtgctgttccttctcgccgccctgctcaccctcgtgccggtgtcctggtcggccaacaccattatccgggacttctacaaccccgtggtgcccgaggcgcagaagcgcgagatgggcgcgggcctgtacgtgggctgggcggccgcggcgctgcagctgctggggggcgcgctgctctgctgctcgtgtcccccacgcgagaagaagtacacggccaccaaggtcgtctactccgcgccgcgctccaccggcccgggagccagcctgggcacaggctacgaccgcaaggactacgtctaagggacagacgcagggagaccccaccaccaccaccaccaccaacaccaccaccaccaccgcgagctggagcgcgcaccaggccatccagcgtgcagccttgcctcggaggccagcccacccccagaagccaggaagcccccgcgctggactggggcagcttccccagcagccacggctttgcgggccgggcagtcgacttcggggcccagggaccaacctgcatggactgtgaaacctcacccttctggagcacggggcctgggtgaccgccaatacttgaccaccccgtcgagccccatcgggccgctgcccccatgctcgcgctgggcagggaccggcagccctggaaggggcacttgatatttttcaataaaagcctttcgttttgcaaaaaaaaaaaaaaaaaaaaaaaaaaaaaaaaaaaaaaaaaaaaa

SEQ ID NO: 200 - DNA, 1846 bp, Homo sapiens
aaaagtgcctttgttggcctgggctcaggaatccagagaaactggtcaggaggaggccccagtgacaaaaacccctccctctgcccccgcccctctgccagagccatataactgctcaacctgtccccgagagagagtgccctggcagctgtcggctggaaggaactggtctgctcacacttgctggcttgcgcatcaggactggctttatctcctgactcacggtgcaaaggtgcactctgcgaacgttaagtccgtccccagcgcttggaatcctacggcccccacagccggatcccctcagccttccaggtcctcaactcccgtggacgctgaacaatggcctccatggggctacaggtaatgggcatcgcgctggccgtcctgggctggctggccgtcatgctgtgctgcgcgctgcccatgtggcgcgtgacggccttcatcggcagcaacattgtcacctcgcagaccatctgggagggcctatggatgaactgcgtggtgcagagcaccggccagatgcagtgcaaggtgtacgactcgctgctggcactgccgcaggacctgcaggcggcccgcgccctcgtcatcatcagcatcatcgtggctgctctgggcgtgctgctgtccgtggtggggggcaagtgtaccaactgcctggaggatgaaagcgccaaggccaagaccatgatcgtggcgggcgtggtgttcctgttggccggccttatggtgatagtgccggtgtcctggacggcccacaacatcatccaagacttctacaatccgctggtggcctccgggcagaagcgggagatgggtgcctcgctctacgtcggctgggccgcctccggcctgctgctccttggcggggggctgctttgctgcaactgtccaccccgcacagacaagccttactccgccaagtattctgctgcccgctctgctgctgccagcaactacgtgtaaggtgccacggctccactctgttcctctctgctttgttcttccctggactgagctcagcgcaggctgtgaccccaggagggccctgccacgggccactggctgctggggactggggactgggcagagactgagccaggcaggaaggcagcagccttcagcctctctggcccactcggacaacttcccaaggccgcctcctgctagcaagaacagagtccaccctcctctggatattggggagggacggaagtgacagggtgtggtggtggagtggggagctggcttctgctggccaggatagcttaaccctgactttgggatctgcctgcatcggcgttggccactgtccccatttacattttccccactctgtctgcctgcatctcctctgttccgggtaggccttgatatcacctctgggactgtgccttgctcaccgaaacccgcgcccaggagtatggctgaggccttgcccacccacctgcctgggaagtgcagagtggatggacgggtttagaggggaggggcgaaggtgctgtaaacaggtttgggcagtggtgggggagggggccagagaggcggctcaggttgcccagctctgtggcctcaggactctctgcctcacccgcttcagcccagggcccctggagactgatcccctctgagtcctctgccccttccaaggacactaatgagcctgggagggtggcagggaggaggggacagcttcacccttggaagtcctggggtttttcctcttccttctttgtggtttctgttttgtaatttaagaagagctattcatcactgtaattattattattttctacaataaatgggacctgtgcacaggaaaaaaaaaaaaaaaaaaaaaaaa

SEQ ID NO: 201 - DNA, 691 bp, Homo sapiens
gacccctcacactcacctagccaccatggacatcgccatccaccacccctggatccgccgccccttctttcctttccactcccccagccgcctctttgaccagttcttcggagagcacctgttggagtctgatcttttcccgacgtctacttccctgagtcccttctaccttcggccaccctccttcctgcgggcacccagctggtttgacactggactctcagagatgcgcctggagaaggacaggttctctgtcaacctggatgtgaagcacttctccccagaggaactcaaagttaaggtgttgggagatgtgattgaggtgcatggaaaacatgaagagcgccaggatgaacatggtttcatctccagggagttccacaggaaataccggatcccagctgatgtagaccctctcaccattacttcatccctgtcatctgatggggtcctcactgtgaatggaccaaggaaacaggtctctggccctgagcgcaccattcccatcacccgtgaagagaagcctgctgtcaccgcagcccccaagaaatagatgccctttcttgaattgcattttttaaaacaagaaagtttccccaccagtgaatgaaagtcttgtgactagtgctgaagcttattaatgctaagggcaggcccaaattatcaagctaataaaatatcattcagcaac

SEQ ID NO: 202 - DNA, 3217 bp, Homo sapiens
tccctcgcccggaggcagagatgcgctggcgcatcaccgccaggagcccacagtgaaagaccatcggatggaaggcgacgcccagaactccaggagaccgctgtgggaggacgcgaggccaggtgacgaataggccaggcgtgagttcccaaacagcctcctccccttcaagagagtaagcttgggccacaggctgggacggaagcagaggggcagacacgccaccacccgcccggcctcgaacctacggcggcacagttcagcggaggcggcccagcggtcctgtcccgcgcctgcgcactccaggccccgccccgccccgcgccctccaggcccggcccgccctccaacctctgcgtgcgcacagcctagagcccgcctccgtgaaagactgccgggcgcatgcggtcggggttgttcactggctgtccggggctccgcgcgcgtcgccggcccagctctgtcgctgacgggaggatctgaagccggccgcaggtcaaagagtaaaatgaagtacattctggttactggtggtgttatatcaggaattggaaaaggaatcattgccagcagtgtgggcacaatactcaagtcatgtggtttacatgtaacttcaatcaaaattgacccctacattaacattgatgcaggaacattctctccttatgagcatggtgaggtttttgtgctggatgatggtggggaagtagaccttgacctgggtaactatgagcggttccttgacatccgcctcaccaaggacaataatctgaccactggaaagatataccagtatgtcattaacaaggaacggaaaggagattacttggggaaaactgtccaagttgtccctcatatcacagatgcaatccaggagtgggtgatgagacaggcgttaatacctgtagatgaagatggcctggaacctcaagtgtgtgttattgagcttggtggaaccgtgggggacatagaaagcatgccctttattgaggccttccgtcagttccaattcaaggtcaaaagagagaacttttgtaacatccacgtcagtctagttccccagccaagttcaacaggggaacagaagactaaacctacccagaatagtgttcgggaacttagaggacttgggctttccccagatctggttgtatgcaggtgctcaaatccacttgacacatcagtgaaggagaaaatatcaatgttctgccatgttgagcctgaacaagtgatctgtgtccacgatgtctcatccatctaccgagtccccttgttgttagaggagcaaggggttgtagattattttcttcgaagacttgaccttcctattgagaggcagccaagaaaaatgctgatgaaatggaaagagatggctgacagatatgatcgcttgctggagacctgctctattgcccttgtgggcaaatacacgaagttctcagactcctatgcctctgtcattaaggctctggagcattctgcactggccatcaaccacaaattggaaatcaagtacatagattctgcggacttggagcccatcacctcgcaagaagagcccgtgcgctaccacgaagcttggcagaagctctgtagtgctcatggagtgctggttccaggaggatttggtgttcgaggaacagaaggaaaaatccaagcaattgcctgggctcggaatcagaaaaagccttttttgggcgtgtgcttagggatgcagttggcagtggttgaattctcaagaaacgtgctgggatggcaagatgccaattctacagagtttgaccctacgaccagtcatcccgtggtcgtagacatgccagaacacaacccagggcagatgggcggaaccatgaggctgggcaagaggagaaccctgttccagaccaagaactcagtcatgaggaaactctatggagacgcagactacttggaagagaggcaccgccaccgatttgaggtgaatccagtctggaaaaagtgtttggaagaacaaggcttgaagtttgttggccaagatgttgaaggagagagaatggaaattgtggagttagaagatcatcccttttttgttggggttcagtaccaccctgagttcctgtccaggcctatcaagccctccccaccatactttggcctcctcctggcctctgtggggcggctctcacattacctccagaaaggctgcaggctctcacccagggacacctatagtgacaggagtggaagcagctcccctgactctgaaatcaccgaactgaagtttccatcaataaatcatgactgatcttgtagcggatgattcttcaagagacccttcaaacttgggtagagtttacagctctgactttacactcggctttggagactttctttaaattatgtttttattaagattattttattatgcggaaaggtatttgggaaacttgtcacttgcatgtcccatcacgtgtactggctcctctgtggtgtctgcctgttgcgtgacactctccttgcagttcttgagttgcggcagaacatcgcgatgggaaccgatggtgggtggggctgcagagtgccccatcggtcaccttgtttctcaactacctcgcatcattgcagatgctagcgcgttgcctgtcgctttcccttggatacctagaccgttataaagtgtgccacatggacttaccgagcatggagagaggattttagctaggatttgaacacttggtgctgggaacctcagggtattgcttgccactaagccatgaaaccagagacaaaatctctatactgccctgagttggggggaattctcagtgccaactgtggctggtcctcattcaaagggacggtcagtttggtgtcaacatgaaacaccaagatgtctgtctctgaagcgtgattttaaaatccccatgcctgtggctgcgcttcctatttctagggctgggaaacactccttgcatcaaggggtcacttacagaacaaagaatcttttgggggaaacttcctctaaaaccctctcatatatagacagctttgactggagggtccatttttcttccaggatggtgttactgcagttgaaagggcaatatgaagttactttcttaatgtgacctagcaataggcatagctacgtggcactatattctggccagactcgatgtgtactctaacttaagaaataaatcagtaaggcagaacaagaaaaaaaaaaaaaaaaaaa

SEQ ID NO: 203 - DNA, 1212 bp, Homo sapiens
atgttcagcgtatttgaggaaatcacaagaattgtagttaaggagatggatgctggaggggatatgattgccgttagaagccttgttgatgctgatagattccgctgcttccatctggtgggggagaagagaactttctttggatgccggcactacacaacaggcctcaccctgatggacattctggacacagatggggacaagtggttagatgaactggattctgggctccaaggtcaaaaggctgagtttcaaattctggataatgtagactcaacgggagagttgatagtgagattacccaaagaaataacaatttcaggcagtttccagggcttccaccatcagaaaatcaagatatcggagaaccggatatcccagcagtatctggctacccttgaaaacaggaagctgaagagggaactacccttttcattccgatcaattaatacgagagaaaacctgtatctggtgacagaaactctggagacggtaaaggaggaaaccctgaaaagcgaccggcaatataaattttggagccagatctctcagggccatctcagctataaacacaagggccaaagggaagtgaccatccccccaaatcgggtcctgagctatcgagtaaagcagcttgtcttccccaacaaggagacgatgaagaaggatggtgcttcatcctgtttaggaaagtctttgggttcggaggattccagaaacatgaaggagaagttggaggacatggagagtgtcctcaaggacctgacagaggagaagagaaaagatgtgctaaactccctcgctaagtgcctcggcaaggaggatattcggcaggatctagagcaaagagtatctgaggtcctgatttccagggagctacacatggaggactcagacaagcctctcctaagcagcctttttaatgctgctggggtcttggtagaagcgcgtgcaaaagccattctggacttcctggatgccctgctagagctgtctgaagagcagcagtttgtggctgaggccctggagaaggggacccttcctctgttgaaggaccaggtgaaatctgtcatggagcagaactgggatgagctggccagcagtcctcctgacatggactatgaccctgaggcacgaattctctgtgcgctgtatgttgttgtctctatcctgctggagctggctgaggggcctacctctgtctcttcctaa

SEQ ID NO: 204 - DNA, 1653 bp, Homo sapiens
acccgagcaccttctcttcactcagccaactgctcgctcgctcacctccctcctctgcaccatgaccacctgcagccgccagttcacctcctccagctccatgaagggctcctgcggcatcgggggcggcatcgggggcggctccagccgcatctcctccgtcctggccggagggtcctgccgcgcccccagcacctacgggggcggcctgtctgtctcatcctcccgcttctcctctgggggagcctacgggctggggggcggctatggcggtggcttcagcagcagcagcagcagctttggtagtggctttgggggaggatatggtggtggccttggtgctggcttgggtggtggctttggtggtggctttgctggtggtgatgggcttctggtgggcagtgagaaggtgaccatgcagaacctcaatgaccgcctggcctcctacctggacaaggtgcgtgctctggaggaggccaacgccgacctggaagtgaagatccgtgactggtaccagaggcagcggcctgctgagatcaaagactacagtccctacttcaagaccattgaggacctgaggaacaagattctcacagccacagtggacaatgccaatgtccttctgcagattgacaatgcccgtctggccgcggatgacttccgcaccaagtatgagacagagttgaacctgcgcatgagtgtggaagccgacatcaatggcctgcgcagggtgctggacgaactgaccctggccagagctgacctggagatgcagattgagagcctgaaggaggagctggcctacctgaagaagaaccacgaggaggagatgaatgccctgagaggccaggtgggtggagatgtcaatgtggagatggacgctgcacctggcgtggacctgagccgcattctgaacgagatgcgtgaccagtatgagaagatggcagagaagaaccgcaaggatgccgaggaatggttcttcaccaagacagaggagctgaaccgcgaggtggccaccaacagcgagctggtgcagagcggcaagagcgagatctcggagctccggcgcaccatgcagaacctggagattgagctgcagtcccagctcagcatgaaagcatccctggagaacagcctggaggagaccaaaggtcgctactgcatgcagctggcccagatccaggagatgattggcagcgtggaggagcagctggcccagctccgctgcgagatggagcagcagaaccaggagtacaagatcctgctggacgtgaagacgcggctggagcaggagatcgccacctaccgccgcctgctggagggcgaggacgcccacctctcctcctcccagttctcctctggatcgcagtcatccagagatgtgacctcctccagccgccaaatccgcaccaaggtcatggatgtgcacgatggcaaggtggtgtccacccacgagcaggtccttcgcaccaagaactgaggctgcccagccccgctcaggcctaggaggccccccgtgtggacacagatcccactggaagatcccctctcctgcccaagcacttcacagctggaccctgcttcaccctcaccccctcctggcaatcaatacagcttcattatctgagttgcataaaaaaaaaaaaaaaaaaa

SEQ ID NO: 205 - DNA, 1490 bp, Homo sapiens
agatatccgcccctgacaccattcctcccttcccccctccaccggccgcgggcataaaaggcgccaggtgagggcctcgccgctcctcccgcgaatcgcagcttctgagaccagggttgctccgtccgtgctccgcctcgccatgacttcctacagctatcgccagtcgtcggccacgtcgtccttcggaggcctgggcggcggctccgtgcgttttgggccgggggtcgcctttcgcgcgcccagcattcacgggggctccggcggccgcggcgtatccgtgtcctccgcccgctttgtgtcctcgtcctcctcgggggcctacggcggcggctacggcggcgtcctgaccgcgtccgacgggctgctggcgggcaacgagaagctaaccatgcagaacctcaacgaccgcctggcctcctacctggacaaggtgcgcgccctggaggcggccaacggcgagctagaggtgaagatccgcgactggtaccagaagcaggggcctgggccctcccgcgactacagccactactacacgaccatccaggacctgcgggacaagattcttggtgccaccattgagaactccaggattgtcctgcagatcgacaatgcccgtctggctgcagatgacttccgaaccaagtttgagacggaacaggctctgcgcatgagcgtggaggccgacatcaacggcctgcgcagggtgctggatgagctgaccctggccaggaccgacctggagatgcagatcgaaggcctgaaggaagagctggcctacctgaagaagaaccatgaggaggaaatcagtacgctgaggggccaagtgggaggccaggtcagtgtggaggtggattccgctccgggcaccgatctcgccaagatcctgagtgacatgcgaagccaatatgaggtcatggccgagcagaaccggaaggatgctgaagcctggttcaccagccggactgaagaattgaaccgggaggtcgctggccacacggagcagctccagatgagcaggtccgaggttactgacctgcggcgcacccttcagggtcttgagattgagctgcagtcacagctgagcatgaaagctgccttggaagacacactggcagaaacggaggcgcgctttggagcccagctggcgcatatccaggcgctgatcagcggtattgaagcccagctgggcgatgtgcgagctgatagtgagcggcagaatcaggagtaccagcggctcatggacatcaagtcgcggctggagcaggagattgccacctaccgcagcctgctcgagggacaggaagatcactacaacaatttgtctgcctccaaggtcctctgaggcagcaggctctggggcttctgctgtcctttggagggtgtcttctgggtagagggatgggaaggaagggacccttacccccggctcttctcctgacctgccaataaaaatttatggtccaagggaaaaaaaaaaaaaaaaaaaa

SEQ ID NO: 206 - DNA, 1807 bp, Homo sapiens
attcagcaaatgtttgcggaatgaatggggtgagctggagccaggacctgcaggaagggatctccgcctggttcggcccgcctgcctccactcctgcctctaccatgtccatcagggtgacccagaagtcctacaaggtgtccacctctggcccccgggccttcagcagccgctcctacacgagtgggcccggttcccgcatcagctcctcgagcttctcccgagtgggcagcagcaactttcgcggtggcctgggcggcggctatggtggggccagcggcatgggaggcatcaccgcagttacggtcaaccagagcctgctgagcccccttgtcctggaggtggaccccaacatccaggccgtgcgcacccaggagaaggagcagatcaagaccctcaacaacaagtttgcctccttcatagacaaggtacggttcctggagcagcagaacaagatgctggagaccaagtggagcctcctgcagcagcagaagacggctcgaagcaacatggacaacatgttcgagagctacatcaacaaccttaggcggcagctggagactctgggccaggagaagctgaagctggaggcggagcttggcaacatgcaggggctggtggaggacttcaagaacaagtatgaggatgagatcaataagcgtacagagatggagaacgaatttgtcctcatcaagaaggatgtggatgaagcttacatgaacaaggtagagctggagtctcgcctggaagggctgaccgacgagatcaacttcctcaggcagctatatgaagaggagatccgggagctgcagtcccagatctcggacacatctgtggtgctgtccatggacaacagccgctccctggacatggacagcatcattgctgaggtcaaggcacagtacgaggatattgccaaccgcagccgggctgaggctgagagcatgtaccagatcaagtatgaggagctgcagagcctggctgggaagcacggggatgacctgcggcgcacaaagactgagatctctgagatgaaccggaacatcagccggctccaggctgagattgagggcctcaaaggccagagggcttccctggaggccgccattgcagatgccgagcagcgtggagagctggccattaaggatgccaacgccaagttgtccgagctggaggccgccctgcagcgggccaagcaggacatggcgcggcagctgcgtgagtaccaggagctgatgaacgtcaagctggccctggacatcgagatcgccacctacaggaagctgctggagggcgaggagagccggctggagtctgggatgcagaacatgagtattcatacgaagaccaccagcggctatgcaggtggtctgagctcggcctatgggggcctcacaagccccggcctcagctacagcctgggctccagctttggctctggcgcgggctccagctccttcagccgcaccagctcctccagggccgtggttgtgaagaagatcgagacacgtgatgggaagctggtgtctgagtcctctgacgtcctgcccaagtgaacagctgcggcagcccctcccagcctacccctcctgcgctgccccagagcctgggaaggaggccgctatgcagggtagcactgggaacaggagacccacctgaggctcagccctagccctcagcccacctggggagtttactacctggggaccccccttgcccatgcctccagctacaaaacaattcaattgctttttttttttggtccaaaataaaacctcagctagctctgccaatgtcaaaaaaaaaa

SEQ ID NO: 207 - DNA, 779 bp, Homo sapiens
attctctccttcagcataaaagctgatccacaaacaagaggagcaccagacctcctcttggcttcgagatggcttcgccacaccaagagcccaaacctggagacctgattgagattttccgccttggctatgagcactgggccctgtatataggagatggctacgtgatccatctggctcctccaagtgagtaccccggggctggctcctccagtgtcttctcagtcctgagcaacagtgcagaggtgaaacgggagcgcctggaagatgtggtgggaggctgttgctatcgggtcaacaacagcttggaccatgagtaccaaccacggcccgtggaggtgatcatcagttctgcgaaggagatggttggtcagaagatgaagtacagtattgtgagcaggaactgtgagcactttgtcacccagctgagatatggcaagtcccgctgtaaacaggtggaaaaggccaaggttgaagttggtgtggccacggcgcttggaatcctggttgttgctggatgctcttttgcgattaggagataccaaaaaaaagcgacagcctgaagcagccacaaaatcctgtgttagaagcagctgtgggggtcccagtggagatgagcctcccccatgcctccagcagcctgaccctcgtgccctgtctcaggcgttctctagatcctttcctctgtttccctctctcgctggcaaaagtatgatctaattgaaacaagactgaaggatcaataaacagccatctgccccttcaaaaaaaaaaaaaaa

SEQ ID NO: 208 - DNA, 3037 bp, Homo sapiens
ctcctcacaggtgtgtctctagtcctcgtggttgcctgccccactccctgccgagacgcctgccagaaaggtcacctatcctgaaccccagcaagcctgaaacagctcagccaagcaccctgcgatggaagctgcagatgcctccaggagcaacgggtcgagcccagaagccagggatgcccggagcccgtcgggccccagtggcagcctggagaatggcaccaaggctgacggcaaggatgccaagaccaccaacgggcacggcggggaggcagctgagggcaagagcctgggcagcgccctgaagccaggggaaggtaggagcgccctgttcgcgggcaatgagtggcggcgacccatcatccagtttgtcgagtccggggacgacaagaactccaactacttcagcatggactctatggaaggcaagaggtcgccgtacgcagggctccagctgggggctgccaagaagccacccgttacctttgccgaaaagggcgagctgcgcaagtccattttctcggagtcccggaagcccacggtgtccatcatggagcccggggagacccggcggaacagctacccccgggccgacacgggccttttttcacggtccaagtccggctccgaggaggtgctgtgcgactcctgcatcggcaacaagcagaaggcggtcaagtcctgcctggtgtgccaggcctccttctgcgagctgcatctcaagccccacctggagggcgccgccttccgagaccaccagctgctcgagcccatccgggactttgaggcccgcaagtgtcccgtgcatggcaagacgatggagctcttctgccagaccgaccagacctgcatctgctacctttgcatgttccaggagcacaagaatcatagcaccgtgacagtggaggaggccaaggccgagaaggagacggagctgtcattgcaaaaggagcagctgcagctcaagatcattgagattgaggatgaagctgagaagtggcagaaggagaaggaccgcatcaagagcttcaccaccaatgagaaggccatcctggagcagaacttccgggacctggtgcgggacctggagaagcaaaaggaggaagtgagggctgcgctggagcagcgggagcaggatgctgtggaccaagtgaaggtgatcatggatgctctggatgagagagccaaggtgctgcatgaggacaagcagacccgggagcagctgcatagcatcagcgactctgtgttgtttctgcaggaatttggtgcattgatgagcaattactctctccccccacccctgcccacctatcatgtcctgctggagggggagggcctgggacagtcactaggcaacttcaaggacgacctgctcaatgtatgcatgcgccacgttgagaagatgtgcaaggcggacctgagccgtaacttcattgagaggaaccacatggagaacggtggtgaccatcgctatgtgaacaactacacgaacagcttcgggggtgagtggagtgcaccggacaccatgaagagatactccatgtacctgacacccaaaggtggggtccggacatcataccagccctcgtctcctggccgcttcaccaaggagaccacccagaagaatttcaacaatctctatggcaccaaaggtaactacacctcccgggtctgggagtactcctccagcattcagaactctgacaatgacctgcccgtcgtccaaggcagctcctccttctccctgaaaggctatccctccctcatgcggagccaaagccccaaggcccagccccagacttggaaatctggcaagcagactatgctgtctcactaccggccattctacgtcaacaaaggcaacgggattgggtccaacgaagccccatgagctcctggcggaaggaacgaggcgccacacccctgctcttcctcctgaccctgctgctcttgccttctaagctactgtgcttgtctgggtgggagggagcctggtcctgcacctgccctctgcagccctctgccagcctcttgggggcagttccggcctctccgacttccccactggccacactccattcagactcctttcctgccttgtgacctcagatggtcaccatcattcctgtgctcagaggccaacccatcacaggggtgagataggttggggcctgccctaacccgccagcctcctcctctcgggctggatctgggggctagcagtgagtacccgcatggtatcagcctgcctctcccgcccacgccctgctgtctccaggcctatagacgtttctctccaaggccctatcccccaatgttgtcagcagatgcctggacagcacagccacccatctcccattcacatggcccacctcctgcttcccagaggactggccctacgtgctctctctcgtcctacctatcaatgcccagcatggcagaacctgcagcccttggccactgcagatggaaacctctcagtgtcttgacatcaccctacccaggcggtgggtctccaccacagccactttgagtctgtggtccctggagggtggcttctcctgactggcaggatgaccttagccaagatattcctctgttccctctgctgagataaagaattcccttaacatgatataatccacccatgcaaatagctactggcccagctaccatttaccatttgcctacagaatttcattcagtctacactttggcattctctctggcgatggagtgtggctgggctgaccgcaaaaggtgccttacacactgcccccaccctcagccgttgccccatcagaggctgcctcctccttctgattaccccccatgttgcatatcagggtgctcaaggattggagaggagacaaaaccaggagcagcacagtggggacatctcccgtctcaacagccccaggcctatgggggctctggaaggatgggccagcttgcaggggttggggagggagacatccagcttgggctttcccctttggaataaaccattggtctgtcaaaaaaaaaaaaaaaaaaa

SEQ ID NO: 209 - DNA, 3677 bp, Homo sapiens
tcgcggaggcttggggcagccgggtagctcggaggtcgtggcgctgggggctagcaccagcgctctgtcgggaggcgcagcggttaggtggaccggtcagcggactcaccggccagggcgctcggtgctggaatttgatattcattgatccgggttttatccctcttcttttttcttaaacatttttttttaaaactgtattgtttctcgttttaatttatttttgcttgccattccccacttgaatcgggccgacggcttggggagattgctctacttccccaaatcactgtggattttggaaaccagcagaaagaggaaagaggtagcaagagctccagagagaagtcgaggaagagagagacggggtcagagagagcgcgcgggcgtgcgagcagcgaaagcgacaggggcaaagtgagtgacctgcttttgggggtgaccgccggagcgcggcgtgagccctcccccttgggatcccgcagctgaccagtcgcgctgacggacagacagacagacaccgcccccagccccagctaccacctcctccccggccggcggcggacagtggacgcggcggcgagccgcgggcaggggccggagcccgcgcccggaggcggggtggagggggtcggggctcgcggcgtcgcactgaaacttttcgtccaacttctgggctgttctcgcttcggaggagccgtggtccgcgcgggggaagccgagccgagcggagccgcgagaagtgctagctcgggccgggaggagccgcagccggaggagggggaggaggaagaagagaaggaagaggagagggggccgcagtggcgactcggcgctcggaagccgggctcatggacgggtgaggcggcggtgtgcgcagacagtgctccagccgcgcgcgctccccaggccctggcccgggcctcgggccggggaggaagagtagctcgccgaggcgccgaggagagcgggccgccccacagcccgagccggagagggagcgcgagccgcgccggccccggtcgggcctccgaaaccatgaactttctgctgtcttgggtgcattggagccttgccttgctgctctacctccaccatgccaagtggtcccaggctgcacccatggcagaaggaggagggcagaatcatcacgaagtggtgaagttcatggatgtctatcagcgcagctactgccatccaatcgagaccctggtggacatcttccaggagtaccctgatgagatcgagtacatcttcaagccatcctgtgtgcccctgatgcgatgcgggggctgctgcaatgacgagggcctggagtgtgtgcccactgaggagtccaacatcaccatgcagattatgcggatcaaacctcaccaaggccagcacataggagagatgagcttcctacagcacaacaaatgtgaatgcagaccaaagaaagatagagcaagacaagaaaaaaaatcagttcgaggaaagggaaaggggcaaaaacgaaagcgcaagaaatcccggtataagtcctggagcgtgtacgttggtgcccgctgctgtctaatgccctggagcctccctggcccccatccctgtgggccttgctcagagcggagaaagcatttgtttgtacaagatccgcagacgtgtaaatgttcctgcaaaaacacagactcgcgttgcaaggcgaggcagcttgagttaaacgaacgtacttgcagatgtgacaagccgaggcggtgagccgggcaggaggaaggagcctccctcagggtttcgggaaccagatctctcaccaggaaagactgatacagaacgatcgatacagaaaccacgctgccgccaccacaccatcaccatcgacagaacagtccttaatccagaaacctgaaatgaaggaagaggagactctgcgcagagcactttgggtccggagggcgagactccggcggaagcattcccgggcgggtgacccagcacggtccctcttggaattggattcgccattttatttttcttgctgctaaatcaccgagcccggaagattagagagttttatttctgggattcctgtagacacacccacccacatacatacatttatatatatatatattatatatatataaaaataaatatctctattttatatatataaaatatatatattctttttttaaattaacagtgctaatgttattggtgtcttcactggatgtatttgactgctgtggacttgagttgggaggggaatgttcccactcagatcctgacagggaagaggaggagatgagagactctggcatgatcttttttttgtcccacttggtggggccagggtcctctcccctgcccaggaatgtgcaaggccagggcatgggggcaaatatgacccagttttgggaacaccgacaaacccagccctggcgctgagcctctctaccccaggtcagacggacagaaagacagatcacaggtacagggatgaggacaccggctctgaccaggagtttggggagcttcaggacattgctgtgctttggggattccctccacatgctgcacgcgcatctcgcccccaggggcactgcctggaagattcaggagcctgggcggccttcgcttactctcacctgcttctgagttgcccaggagaccactggcagatgtcccggcgaagagaagagacacattgttggaagaagcagcccatgacagctccccttcctgggactcgccctcatcctcttcctgctccccttcctggggtgcagcctaaaaggacctatgtcctcacaccattgaaaccactagttctgtccccccaggagacctggttgtgtgtgtgtgagtggttgaccttcctccatcccctggtccttcccttcccttcccgaggcacagagagacagggcaggatccacgtgcccattgtggaggcagagaaaagagaaagtgttttatatacggtacttatttaatatccctttttaattagaaattaaaacagttaatttaattaaagagtagggttttttttcagtattcttggttaatatttaatttcaactatttatgagatgtatcttttgctctctcttgctctcttatttgtaccggtttttgtatataaaattcatgtttccaatctctctctccctgatcggtgacagtcactagcttatcttgaacagatatttaattttgctaacactcagctctgccctccccgatcccctggctccccagcacacattcctttgaaataaggtttcaatatacatctacatactatatatatatttggcaacttgtatttgtgtgtatatatatatatatatgtttatgtatatatgtgattctgataaaatagacattgctattctgttttttatatgtaaaaacaaaacaagaaaaaatagagaattctacatactaaatctctctccttttttaattttaatatttgttatcatttatttattggtgctactgtttatccgtaataattgtggggaaaagatattaacatcacgtctttgtctctagtgcagtttttcgagatattccgtagtacatatttatttttaaacaacgacaaagaaatacagatatatcttaaaaaaaaaaaagcattttgtattaaagaatttaattctgatctcaaaaaaaaaaaaaaaaaa

SEQ ID NO: 210 - DNA, 1323 bp, Homo sapiens
atgccaattcctcctcccccgccacccccacctggtcctcctccacctcccacatttcatcaggcaaacacagagcagcccaagctgagtagagatgagcagcggggtcgaggcgccctcttacaggacatttgcaaagggaccaagctgaagaaggtgaccaacattaatgatcggagtgctcccatcctcgagaagcctaaaggaagcagtggtggctatggctctggaggagctgccctgcaccccaagggaggtctcttccaaggaggagtgctgaagcttcgacctgtgggagccaaggatggttcagagaacctagctggtaagccagccctgcaaatccccagttctcgagctgctgccccaaggcctccagtatctgccgccagcgggcgtcctcaggatgatacagacagcagccgggcctcactcccagaactgccccggatgcagagaccctctttaccggacctctctcggcctaataccaccagcagtacgggcatgaagcacagctcctctgcccctcccccaccacccccagggcggcgtgccaacgcaccccccacacctctgcctatgcacagcagcaaagcccccgcctacaacagagagaaacccttgccaccgacgcctggacaaaggcttcaccctggtcgagagggacctcctgctccacccccagtcaaaccacctccttcccctgtgaatatcagaacaggaccaagtggccagtctctggctcctcctcctccgccttaccgccagcctcctggggtccccaatggaccctctagccccactaatgagtcagcccctgagctgccacagagacacaattctttgcataggaagacaccagggcctgtcagaggcctagcacctcctccacccacctcggcctccccatctttactgagtaataggccacctcccccagcccgagaccctcccagtcggggagcagctcctccacccccaccacctgtgatccgaaatggtgccagggatgctccccctcccccaccaccataccgaatgcatgggtcagaacccccgagccgaggaaagcccccacctccaccctcaaggacgccagctgggccaccccctcctcctccaccgcccctgaggaatggccacagagattctatcaccactgtccggtctttcttggatgattttgagtcaaagtattccttccatccagtagaagactttcctgctccagaagaatataaacactttcagaggatatatcccagcaaaacaaaccgagctgcccgtggagccccacctctgccacccattctcaggtga

SEQ ID NO: 211 - DNA, 460 bp, Homo sapiens
gatccaccagctgagaattcgtccgctcccgaggctgagcagggcggggctgagtaaatgccggcttaccatctctaccatcatccggtttagtcatccaacaagaaaaaatatgaaattccagcaataaaaaatgaacaaaagattggagctgaaaacctaaagtgcttgctttttgcccgttgaccaaataaaaaaaactatctgcattatctatgcagctgggggtttttattatttttacctaaagacgtctcttttgggaaaaaacaaacgtgttttttaaaaaaagccgggttttctcccacacgcctttaaaggtttttaaattgtttcaaatcgggccaagttaaaatttaaaaaacttctttttaatttgaaataaagttacaacttgatttttacaaaaaagtaacaacctgcagccccggtaataaggtctaaaaattgtcttggtaaa

SEQ ID NO: 212 - DNA, 2199 bp, Homo sapiens
cagcggcgctgcggcggctcgcgggagacgctgcgcgcggggctagcgggcggcggagcggacggcgacggggcgctctcgggctgccggcggggccgagcgccgcgcgtcccgagcatggcaggctccctgcctccctgcgtggtggactgtggcaccgggtataccaagcttggctacgcaggcaacactgagccccagttcattattccttcatgtattgccatcagagagtcagcaaaggtagttgaccaagctcaaaggagagtgttgaggggagttgatgaccttgactttttcataggagatgaagccatcgataaacctacatatgctacaaagtggccgatacgacatggaatcattgaagactgggatcttatggaaaggttcatggagcaagtggtttttaaatatcttcgagctgaacctgaggaccattattttttaatgacagaacctccactcaatacaccagaaaacagagagtatcttgcagaaattatgtttgaatcatttaacgtaccaggactctacattgcagttcaggcagtgctggccttggcggcatcttggacatctcgacaagtgggtgaacgtacgttaacggggatagtcattgacagcggagatggagtcacccatgttatcccagtggcagaaggttatgtaattggaagctgcatcaaacacatcccgattgcaggtagagatattacgtatttcattcaacagctgctaagggagagggaggtgggaatccctcctgagcagtcactggagaccgcaaaagccattaaggagaaatactgttacatttgccccgatatagtcaaggaatttgccaagtatgatgtggatccccggaagtggatcaaacagtacacgggtatcaatgcgatcaaccagaagaagtttgttatagacgttggttacgaaagattcctgggacctgaaatattctttcacccggagtttgccaacccagactttatggagtccatctcagatgttgttgatgaagtaatacagaactgccccatcgatgtgcggcgcccgctgtataagaatgtcgtactctcaggaggctccaccatgttcagggatttcggacgccgactgcagagggatttgaagagagtggtggatgctaggctgaggctcagcgaggagctcagcggcgggaggatcaagccgaagcctgtggaggtccaggtggtcacgcatcacatgcagcgctacgccgtgtggttcggaggctccatgctggcctcgactcccgagttctttcaggtctgccacaccaagaaggactatgaagagtacgggcccagcatctgccgccacaaccccgtctttggagtcatgtcctagtgtctgcctgaacgcgtcgttcgatggtgtcacgttggggaacaagtgtccttcagaacccagagaaggccgccgttctgtaaatagcgacgtcggtgttgctgcccagcagcgtgcttgcattgccggtgcatgaggcgcggcgcgggcccttcagtaaaagccatttatccgtgtgccgaccgctgtctgccagcctcctccttctcccgccctcctcaccctcgctctccctcctcctcctcctccgagctgctagctgacaaatacaattctgaaggaatccaaatgtgactttgaaaattgttagagaaaacaacattagaaaatggcgcaaaatcgttaggtcccaggagagaatgtgggggcgcaaacccttttcctcccagcctatttttgtaaataaaatgtttaaacttgaaatacaaatcgatgtttatatttcctatcattttgtattttatggtatttggtacaactggctgatactaagcacgaatagatattgatgttatggagtgctgtaatccaaagtttttaattgtgaggcatgttctgatatgtttataggcaaacaaataaaacagcaaacttttttgccacatgtttgctagaaaatgattatactttattggagtgacatgaagtttgaacactaaacagtaatgtatgagaattactacagatacatgtatcttttagttttttttgtttgaactttctggagctgttttatagaagatgatggtttgttgtcggtgagtgttggatgaaatacttccttgcaccattgtaataaaagctgttagaatatttgtaaatatc

SEQ ID NO: 213 - DNA, 1989 bp, Homo sapiens
cagcggcgctgcggcggctcgcgggagacgctgcgcgcggggctagcgggcggcggagcggacggcgacggggcgctctcgggctgccggcggggccgagcgccgcgcgtcccgagcatggcaggctccctgcctccctgcgtggtggactgtggcaccgggtataccaagcttggctacgcaggcaacactgagccccagttcattattccttcatgtattgccatcagagagtcagcaaaggtagttgaccaagctcaaaggagagtgttgaggggagttgatgaccttgactttttcataggagatgaagccatcgataaacctacatatgctacaaagtggccgatacgacatggaatcattgaagactgggatcttatggaaaggttcatggagcaagtggtttttaaatatcttcgagctgaacctgaggaccattattttttaatgacagaacctccactcaatacaccagaaaacagagagtatcttgcagaaattatgtttgaatcatttaacgtaccaggactctacattgcagttcaggcagtgctggccttggcggcatcttggacatctcgacaagtgggtgaacgtacgttaacggggatagtcattgacagcggagatggagtcacccatgttatcccagtggcagaaggttatgtaattggaagctgcatcaaacacatcccgattgcaggtagagatattacgtatttcattcaacagctgctaagggagagggaggtgggaatccctcctgagcagtcactggagaccgcaaaagccattaaggagaaatactgttacatttgccccgatatagtcaaggaatttgccaagtatgatgtggatccccggaagtggatcaaacagtacacgggtatcaatgcgatcaaccagaagaagtttgttatagacgttggttacgaaagattcctgggacctgaaatattctttcacccggagtttgccaacccagactttatggagtccatctcagatgttgttgatgaagtaatacagaactgccccatcgatgtgcggcgcccgctgtataagcccgagttctttcaggtctgccacaccaagaaggactatgaagagtacgggcccagcatctgccgccacaaccccgtctttggagtcatgtcctagtgtctgcctgaacgcgtcgttcgatggtgtcacgttggggaacaagtgtccttcagaacccagagaaggccgccgttctgtaaatagcgacgtcggtgttgctgcccagcagcgtgcttgcattgccggtgcatgaggcgcggcgcgggcccttcagtaaaagccatttatccgtgtgccgaccgctgtctgccagcctcctccttctcccgccctcctcaccctcgctctccctcctcctcctcctccgagctgctagctgacaaatacaattctgaaggaatccaaatgtgactttgaaaattgttagagaaaacaacattagaaaatggcgcaaaatcgttaggtcccaggagagaatgtgggggcgcaaacccttttcctcccagcctatttttgtaaataaaatgtttaaacttgaaatacaaatcgatgtttatatttcctatcattttgtattttatggtatttggtacaactggctgatactaagcacgaatagatattgatgttatggagtgctgtaatccaaagtttttaattgtgaggcatgttctgatatgtttataggcaaacaaataaaacagcaaacttttttgccacatgtttgctagaaaatgattatactttattggagtgacatgaagtttgaacactaaacagtaatgtatgagaattactacagatacatgtatcttttagttttttttgtttgaactttctggagctgttttatagaagatgatggtttgttgtcggtgagtgttggatgaaatacttccttgcaccattgtaataaaagctgttagaatatttgtaaatatc

SEQ ID NO: 214 - DNA, 4786 bp, Homo sapiens; identical to SEQ ID NO: 92

SEQ ID NO: 215 - DNA, 3885 bp, Homo sapiens; identical to SEQ ID NO: 28

SEQ ID NO: 216 - DNA, 6492 bp, Homo sapiens; identical to SEQ ID NO: 175

SEQ ID NO: 217 - DNA, 2724 bp, Homo sapiens
cccagaaggccgcggggggtggaccgcctaagagggcgtgcgctcccgacatgccccgcggcgcgccattaaccgccagatttgaatcgcgggacccgttggcagaggtggcggcggcggcatgggtgccccgacgttgccccctgcctggcagccctttctcaaggaccaccgcatctctacattcaagaactggcccttcttggagggctgcgcctgcaccccggagcggatggccgaggctggcttcatccactgccccactgagaacgagccagacttggcccagtgtttcttctgcttcaaggagctggaaggctgggagccagatgacgaccccattgggccgggcacggtggcttacgcctgtaataccagcactttgggaggccgaggcgggcggatcacgagagaggaacataaaaagcattcgtccggttgcgctttcctttctgtcaagaagcagtttgaagaattaacccttggtgaatttttgaaactggacagagaaagagccaagaacaaaattgcaaaggaaaccaacaataagaagaaagaatttgaggaaactgcggagaaagtgcgccgtgccatcgagcagctggctgccatggattgaggcctctggccggagctgcctggtcccagagtggctgcaccacttccagggtttattccctggtgccaccagccttcctgtgggccccttagcaatgtcttaggaaaggagatcaacattttcaaattagatgtttcaactgtgctcttgttttgtcttgaaagtggcaccagaggtgcttctgcctgtgcagcgggtgctgctggtaacagtggctgcttctctctctctctctcttttttgggggctcatttttgctgttttgattcccgggcttaccaggtgagaagtgagggaggaagaaggcagtgtcccttttgctagagctgacagctttgttcgcgtgggcagagccttccacagtgaatgtgtctggacctcatgttgttgaggctgtcacagtcctgagtgtggacttggcaggtgcctgttgaatctgagctgcaggttccttatctgtcacacctgtgcctcctcagaggacagtttttttgttgttgtgtttttttgtttttttttttttggtagatgcatgacttgtgtgtgatgagagaatggagacagagtccctggctcctctactgtttaacaacatggctttcttattttgtttgaattgttaattcacagaatagcacaaactacaattaaaactaagcacaaagccattctaagtcattggggaaacggggtgaacttcaggtggatgaggagacagaatagagtgataggaagcgtctggcagatactccttttgccactgctgtgtgattagacaggcccagtgagccgcggggcacatgctggccgctcctccctcagaaaaaggcagtggcctaaatcctttttaaatgacttggctcgatgctgtgggggactggctgggctgctgcaggccgtgtgtctgtcagcccaaccttcacatctgtcacgttctccacacgggggagagacgcagtccgcccaggtccccgctttctttggaggcagcagctcccgcagggctgaagtctggcgtaagatgatggatttgattcgccctcctccctgtcatagagctgcagggtggattgttacagcttcgctggaaacctctggaggtcatctcggctgttcctgagaaataaaaagcctgtcatttcaaacactgctgtggaccctactgggtttttaaaatattgtcagtttttcatcgtcgtccctagcctgccaacagccatctgcccagacagccgcagtgaggatgagcgtcctggcagagacgcagttgtctctgggcgcttgccagagccacgaaccccagacctgtttgtatcatccgggctccttccgggcagaaacaactgaaaatgcacttcagacccacttatttctgccacatctgagtcggcctgagatagacttttccctctaaactgggagaatatcacagtggtttttgttagcagaaaatgcactccagcctctgtactcatctaagctgcttatttttgatatttgtgtcagtctgtaaatggatacttcactttaataactgttgcttagtaattggctttgtagagaagctggaaaaaaatggttttgtcttcaactcctttgcatgccaggcggtgatgtggatctcggcttctgtgagcctgtgctgtgggcagggctgagctggagccgcccctctcagcccgcctgccacggcctttccttaaaggccatccttaaaaccagaccctcatggctaccagcacctgaaagcttcctcgacatctgttaataaagccgtaggcccttgtctaagtgcaaccgcctagactttctttcagatacatgtccacatgtccatttttcaggttctctaagttggagtggagtctgggaagggttgtgaatgaggcttctgggctatgggtgaggttccaatggcaggttagagcccctcgggccaactgccatcctggaaagtagagacagcagtgcccgctgcccagaagagaccagcaagccaaactggagcccccattgcaggctgtcgccatgtggaaagagtaactcacaattgccaataaagtctcatgtggttttatctaaaaaaaaaaaaaaaaaaaaaaaaa

SEQ ID NO: 218 - DNA, 4934 bp, Homo sapiens
aatgagggtatttataaactacttaaattataaaaagaatgagacatcagacttacagttttggatactaatttttttcacttaacgttcattatgtgataggagttttccatcctattataccgctgtgcgatctgatcttgggcacgttaaccaacctcttgttgcctcgattttctcacctgtaaaagtgggggtaatcataatgcttacttagtaggatagccctgaagaataagtgacttagcgaacataaatagcttacaatagggttttcagcatgggaaggattcagtaaatgttagctgtcatcatcaccacctacaaaggaagcaatactgtgctgaaagtttttccatcattaatgtaatttctatagtacgattcccaagaagatattaaaattatggaaataaaggtattggtatattcctaattatttcctaaaagattgtattgataaatatgctcatccttcccttaacgggatgcattccagaaaaacaagtcaaatgttagacaaagtatcagaagggaaattctgtagccagagagctaaaaattacaatagggtctctaattatacttcaacttttttaggaataattctcagtgtgttttcccacatttcatatgtaatttttttttttttttttttttgagacagagcctcgccctgtcaccaggctggagtacagtggcgcgatctcggctcactgcaacttccacctgctgggttcaagcaattcttctgacctcaggtgatccacccgcctcggcctcccaaagtgctgggattataacaggcgtggcatgagtcaccgcgcccggccgatctttacttttttattctttgtaccccctgcctatccagttagcatgtgattaaagtcaaagatttgccactttgggccacatctattaattttcatctttgttataattgtatttagtttttgatctacactgcttattactcccagtcattttttatagaactgaaaatctggtaaaatactcaaaattgcactgacttctatgtagaggcgacactccatcagaaccgtgggctgacagggaatcccactgtgcaggagctgcgcgcattttcatttctgattctctttggcgtatccaggactctgatgacatgatcatatatttatcagtagtaacaggttgggccatttgttttttgtggtaaatcatatatttaagattttagaaataagttgatagccatgtattttggaatttgaaaaagacattgcattactcagcttcaaattaagctttaatcaaatagtgaaactttccattaatggacagtgtatacctttttgtgtatttaaaaaaaaaaacactgaatatagtgcctttgtgacaggggagcttggttcctgacaatgtcctcttgagccttttttttttttttgagatggagtctcactgtgtcacccaggctggagtgcagtggcgccatcttggctcactgcaacctccgccccctgggttcaagtgattctcattcctcagcttcctaagtagctgggattacaggcacgcaccaccatgaccagctaatttttatacttttagtagagacagggttttgccatgttggctaggttggtctcgaactcctgacctcaagtaatccacccaccatggcctccccaaagtgctgggattacaggcgtgagccatttcacccggcctctcttccgtctttgagctgtgaggaaatagctacattacatgagctgctagatctgccttatggtcagaaatgaaggttgaactctcaggaacagtgacatatatacacactgatatttccaaagtacaatgccccaaattgatccacaaaggaattaaggtcatttgcaacaaaatcacagaatagtaacaaataaatagaagataaatatggccagggatgctgcaaactgatatactgccaagtttatcagttgggaatcccaacagtgaaaagcataaaaatgaaaggaattttaaggagactttttatagaagagtgggaaggattggaggagccaacaagtgatggtgaggcacacagggaagagcttcagtgggcaccatcccctctctggtttgaaggggtagggaggggaccagagctgggaggagggggctggaatactgctggaggagccactcccttccagacctgctgtggccatcacagaatgcagccactgccagagcagcagcccgaggaaccaggcagggggagcacaagtaccctagcctctctctttctgtttcttgcctgccgatctcctccactggctaaacccagctggatgctaagagtacagtcagcctgcctgctgaggagggaccaccagggaccaccatcagcaagggatccaatgtctttctgcctctgcagaatgaaggttggggcgcggggggcgctctacttcttagggatattgtgggaataaaaggaaataggcaaaaaatgtttttgaaaaacaaagcacatactgcgcacccgtgggccactactgcttttgacccctggctctgtttcatgaagtaatgtcgtgtcattctctttttaggtgctacaggatttctttaggtttgttttctgtccaccatatttcaactcatgtgtgctgtttgttgtgctaaaacaaatatttgctgatgcctgagtgaatagttgaatattttatataagtcaaatttatacgtaatgatttttcttgtaacttagccgtttctcttttacaaactcagaaaacctcagactttgaaaaggccttgaagttcctcacctgaaatctgagaacttggagcgccttaaaaaatctaaaggaaaacaaaacagtgaaagaacatgatatagtcagtgtagagaataaaattatttatgtaattaatattgaggatgcagataacacattgtgaaatcttgcttgtaaaaaatctcgatctgctgaagaaagatgttctctctagagatctttgaaagcataattattgagcttttaaaatgttagaaacaaaagttagacccacacatattctggcgtgtggaagatttgcattccttcccctgcccgccccgcccccacacttgtgagttgtgcctgtgtacgcagttcctgtagcactcggctgggcagaaatcatctttcagcactaagggaacatagttatgatctggaccttctgggagtggtcagtgcccaagaacaggtatgggactccagaaagttctgctctcaaccctattttgaaatagagttacacattgttctacaattatttgagttaataagcagctcttttcaaacgtgattatgcccttccaagtttaaatacactagactttagtgaaagtaattgacctcatctcatttctctcctgttatattaagatcactttcagtaaaaggtagaagcttttgaagtggtgaggaggaggtagaggagggacatagagcagataggggctggaaagtggggtgaggaagagagtggcttctctttggcagagtaccaaggaaaagccctatctgtacagaacctttgtgcctgggaacttgatggctgcaacctgagcctcaacctagtttgcttgcggagccagaagagaagctaaaaaccttcagttaaccaagccagacaccaagaaagttaaaccgaaagagaaccccccaccccccgcaaaaaaaagaagtaaagtgggttaaagtgatatcatgttagcacagaaagagaacataagggtcatctaagttcatctgccccctcttctatttcaaggtgcagaaactaaggcacaagggaccccgtgtcctgctcttgatcacatagctagtgggtgccaagccaggtctagaactctgttctctggggtcacaggctggctcttcatccctctagagagatagctcatctgtgtgcacctgagcccgttgtgtttcggagtcaaagcaaataaaggctcaaactccaagactgttttgcagaccggctgcagtagatatggggggaggagaaacctgctttaaattgcttcaagcaagttgtttctgcaaaggtgttgacttttttctttcaactttctagtgagtcactgcagcctgagctgttatttgtcattatgcaataattcaggaactaactcaagattcttctttttaaattatttgtttatttagagacagagtcttgctctgttgcccaggctggagtgcagtggtgtgatctcggctcactgcagcctctgcctcctgggttcaagcaattctcatgtctcagcctcccgaatagctggtattgcaggctcgtgccaccaccccctgctaatttttgtaattttagtggagacacggtttcgccatgttggccgggctcgtcttgagctcctggcctcaggtgatccgcccgcctcggcctcccaaagtgctgggattgcagccgtgagcctccacacccggcctatttatttatttttaaattggctgctcttagaaaggcataccatgtttctggatgggaaggcttattaattcaccctaatttaatgtataaatttgatgcaatcatagtcacagtcccagtggaattttttaacttggtaagatgttctaaaattaatgagagaacttgaattaccaggtattgaaacactgtaaagccacaatcatgtaaacagtatgttataaccatgggaatagaggtctgtgatacagcagaaaaaagtgaaaaaaagaataactgtattcataaaaatttaaatgtggagtcactgggggaaaggattaaatattcgataatgtagaaacaactcaactatttggagaaatgtaaatttagagccttatctcatgccatataccaaaatactatttagatttgattaaaaaataaaaaaaaaaaaaaaaaaa

SEQ ID NO: 219 - DNA, 2177 bp, Homo sapiens; identical to SEQ ID NO: 197

SEQ ID NO: 220 - DNA, 2011 bp, Homo sapiens
gcggccgccagcgcggtgtagggggcaggcgcggatcccgccaccgccgcgcgctcggcccgccgactcccggcgccgccgccgccactgccgtcgccgccgccgcctgccgggactggagcgcgccgtccgccgcggacaagaccctggcctcaggccggagcagccccatcatgccgagggagcgcagggagcgggatgcgaaggagcgggacaccatgaaggaggacggcggcgcggagttctcggctcgctccaggaagaggaaggcaaacgtgaccgtttttttgcaggatccagatgaagaaatggccaaaatcgacaggacggcgagggaccagtgtgggagccagccttgggacaataatgcagtctgtgcagacccctgctccctgatccccacacctgacaaagaagatgatgaccgggtttacccaaactcaacgtgcaagcctcggattattgcaccatccagaggctccccgctgcctgtactgagctgggcaaatagagaggaagtctggaaaatcatgttaaacaaggaaaagacatacttaagggatcagcactttcttgagcaacaccctcttctgcagccaaaaatgcgagcaattcttctggattggttaatggaggtgtgtgaagtctataaacttcacagggagaccttttacttggcacaagatttctttgaccggtatatggcgacacaagaaaatgttgtaaaaactcttttacagcttattgggatttcatctttatttattgcagccaaacttgaggaaatctatcctccaaagttgcaccagtttgcgtatgtgacagatggagcttgttcaggagatgaaattctcaccatggaattaatgattatgaaggcccttaagtggcgtttaagtcccctgactattgtgtcctggctgaatgtatacatgcaggttgcatatctaaatgacttacatgaagtgctactgccgcagtatccccagcaaatctttatacagattgcagagctgttggatctctgtgtcctggatgttgactgccttgaatttccttatggtatacttgctgcttcggccttgtatcatttctcgtcatctgaattgatgcaaaaggtttcagggtatcagtggtgcgacatagagaactgtgtcaagtggatggttccatttgccatggttataagggagacggggagctcaaaactgaagcacttcaggggcgtcgctgatgaagatgcacacaacatacagacccacagagacagcttggatttgctggacaaagcccgagcaaagaaagccatgttgtctgaacaaaatagggcttctcctctccccagtgggctcctcaccccgccacagagcggtaagaagcagagcagcgggccggaaatggcgtgaccaccccatccttctccaccaaagacagttgcgcgcctgctccacgttctcttctgtctgttgcagcggaggcgtgcgtttgcttttacagatatctgaatggaagagtgtttcttccacaacagaagtatttctgtggatggcatcaaacagggcaaagtgttttttattgaatgcttataggttttttttaaataagtgggtcaagtacaccagccacctccagacaccagtgcgtgctcccgatgctgctatggaaggtgctacttgacctaagggactcccacaacaacaaaagcttgaagctgtggagggccacggtggcgtggctctcctcgcaggtgttctgggctccgttgtaccaagtggagcaggtggttgcgggcaagcgttgtgcagagcccatagccagctgggcagggggctgccctctccacattatcagttgacagtgtacaatgcctttgatgaactgttttgtaagtgctgctatatctatccattttttaataaagataatactgtttttgaaaaaaaaaaaaaaaaaaaaaaaaaaaaaaaaaaaaaaaaaaaaaaaaaaaaaaaaaaaaaaaaaaaaaaaaaaa

SEQ ID NO: 221 - DNA, 1923 bp, Homo sapiens
agcgcggtgagtttgaaactgctcgcacttggcttcaaagctggctcttggaaattgagcggagagcgacgcggttgttgtagctgccgctgcggccgccgcggaataataagccgggatctaccatacccattgactaactatggaagattataccaaaatagagaaaattggagaaggtacctatggagttgtgtataagggtagacacaaaactacaggtcaagtggtagccatgaaaaaaatcagactagaaagtgaagaggaaggggttcctagtactgcaattcgggaaatttctctattaaaggaacttcgtcatccaaatatagtcagtcttcaggatgtgcttatgcaggattccaggttatatctcatctttgagtttctttccatggatctgaagaaatacttggattctatccctcctggtcagtacatggattcttcacttgttaagagttatttataccaaatcctacaggggattgtgttttgtcactctagaagagttcttcacagagacttaaaacctcaaaatctcttgattgatgacaaaggaacaattaaactggctgattttggccttgccagagcttttggaatacctatcagagtatatacacatgaggtagtaacactctggtacagatctccagaagtattgctggggtcagctcgttactcaactccagttgacatttggagtataggcaccatatttgctgaactagcaactaagaaaccacttttccatggggattcagaaattgatcaactcttcaggattttcagagctttgggcactcccaataatgaagtgtggccagaagtggaatctttacaggactataagaatacatttcccaaatggaaaccaggaagcctagcatcccatgtcaaaaacttggatgaaaatggcttggatttgctctcgaaaatgttaatctatgatccagccaaacgaatttctggcaaaatggcactgaatcatccatattttaatgatttggacaatcagattaagaagatgtagctttctgacaaaaagtttccatatgttatatcaacagatagttgtgtttttattgttaactcttgtctatttttgtcttatatatatttctttgttatcaaacttcagctgtacttcgtcttctaatttcaaaaatataacttaaaaatgtaaatattctatatgaatttaaatataattctgtaaatgtgtgtaggtctcactgtaacaactatttgttactataataaaactataatattgatgtcaggaatcaggaaaaaatttgagttggcttaaatcatctcagtccttatggcagttttattttcctgtagttggaactactaaaatttaggaaaatgctaagttcaagtttcgtaatgctttgaagtatttttatgctctgaatgtttaaatgttctcatcagtttcttgccatgttgttaactatacaacctggctaaagatgaatatttttctactggtattttaatttttgacctaaatgtttaagcattcggaatgagaaaactatacagatttgagaaatgatgctaaatttataggagttttcagtaacttaaaaagctaacatgagagcatgccaaaatttgctaagtcttacaaagatcaagggctgtccgcaacagggaagaacagttttgaaaatttatgaactatcttatttttaggtaggttttgaaagctttttgtctaagtgaattcttatgccttggtcagagtaataactgaaggagttgcttatcttggctttcgagtctgagtttaaaactacacattttgacatagtgtttattagcagccatctaaaaaggctctaatgtatatttaactaaaattactagctttgggaattaaactgtttaacaaataaaaaaaaaaaa

SEQ ID NO: 222 - DNA, 3053 bp, Homo sapiens; identical to SEQ ID NO: 39

SEQ ID NO: 223 - DNA, 1842 bp, Homo sapiens
cggaatggggcgggacttccagtaggaggcggcaagtttgaaaagtgatgacggttgacgtttgctgatttttgactttgcttgtagctgctccccgaactcgccgtcttcctgtcggcggccggcactgtagattaacaggaaacttccaagatggaaactttgtctttccccagatataatgtagctgagattgtgattcatattcgcaataagatcttaacaggagctgatggtaaaaacctcaccaagaatgatctttatccaaatccaaagcctgaagtcttgcacatgatctacatgagagccttacaaatagtatatggaattcgactggaacatttttacatgatgccagtgaactctgaagtcatgtatccacatttaatggaaggcttcttaccattcagcaatttagttactcatctggactcatttttgcctatctgccgggtgaatgactttgagactgctgatattctatgtccaaaagcaaaacggacaagtcggtttttaagtggcattatcaactttattcacttcagagaagcatgccgtgaaacgtatatggaatttctttggcaatataaatcctctgcggacaaaatgcaacagttaaacgccgcacaccaggaggcattaatgaaactggagagacttgattctgttccagttgaagagcaagaagagttcaagcagctttcagatggaattcaggagctacaacaatcactaaatcaggattttcatcaaaaaacgatagtgctgcaagagggaaattcccaaaagaagtcaaatatttcagagaaaaccaagcgtttgaatgaactaaaattgtcggtggtttctttgaaagaaatacaagagagtttgaaaacaaaaattgtggattctccagagaagttaaagaattataaagaaaaaatgaaagatacggtccagaagcttaaaaatgccagacaagaagtggtggagaaatatgaaatctatggagactcagttgactgcctgccttcatgtcagttggaagtgcagttatatcaaaagaaaatacaggacctttcagataatagggaaaaattagccagtatcttaaaggagagcctgaacttggaggaccaaattgagagtgatgagtcagaactgaagaaattgaagactgaagaaaattcgttcaaaagactgatgattgtgaagaaggaaaaacttgccacagcacaattcaaaataaataagaagcatgaagatgttaagcaatacaaacgcacagtaattgaggattgcaataaagttcaagaaaaaagaggtgctgtctatgaacgagtaaccacaattaatcaagaaatccaaaaaattaaacttggaattcaacaactaaaagatgctgctgaaagggagaaactgaagtcccaggaaatatttctaaacttgaaaactgctttggagaaataccacgacggtattgaaaaggcagcagaggactcctatgctaagatagatgagaagacagctgaactgaagaggaagatgttcaaaatgtcaacctgattaacaaaattacatgtctttttgtaaatggcttgccatcttttaattttctatttagaaagaaaagttgaagcgaatggaagtatcagaagtaccaaataatgttggcttcatcagtttttatacactctcataagtagttaataagatgaatttaatgtaggcttttattaatttataattaaaataacttgtgcagctattcatgtctctactctgccccttgttgtaaatagtttgagtaaaacaaaactagttacctttgaaatatatatatttttttctgttactatc

SEQ ID NO: 224 - DNA, 3686 bp, Homo sapiens
ggctagcgcgggaggtggagaaagaggcttgggcggccccgctgtagccgcgtgtgggaggacgcacgggcctgcttcaaagctttgggataacagcgcctccgggggataatgaatgcggagcctccgttttcagtcgacttcagatgtgtctccacttttttccgctgtagccgcaaggcaaggaaacatttctcttcccgtactgaggaggctgaggagtgcactgggtgttcttttctcctctaacccagaactgcgagacagaggctgagtccctgtaaagaacagctccagaaaagccaggagagcgcaggagggcatccgggaggccaggaggggttcgctggggcctcaaccgcacccacatcggtcccacctgcgagggggcgggacctcgtggcgctggaccaatcagcacccacctgcgctcacctggcctcctcccgctggctcccgggggctgcggtgctcaaaggggcaagagctgagcggaacaccggcccgccgtcgcggcagctgcttcacccctctctctgcagccatggggctccctcgtggacctctcgcgtctctcctccttctccaggtttgctggctgcagtgcgcggcctccgagccgtgccgggcggtcttcagggaggctgaagtgaccttggaggcgggaggcgcggagcaggagcccggccaggcgctggggaaagtattcatgggctgccctgggcaagagccagctctgtttagcactgataatgatgacttcactgtgcggaatggcgagacagtccaggaaagaaggtcactgaaggaaaggaatccattgaagatcttcccatccaaacgtatcttacgaagacacaagagagattgggtggttgctccaatatctgtccctgaaaatggcaagggtcccttcccccagagactgaatcagctcaagtctaataaagatagagacaccaagattttctacagcatcacggggccgggggcagacagcccccctgagggtgtcttcgctgtagagaaggagacaggctggttgttgttgaataagccactggaccgggaggagattgccaagtatgagctctttggccacgctgtgtcagagaatggtgcctcagtggaggaccccatgaacatctccatcatagtgaccgaccagaatgaccacaagcccaagtttacccaggacaccttccgagggagtgtcttagagggagtcctaccaggtacttctgtgatgcagatgacagccacagatgaggatgatgccatctacacctacaatggggtggttgcttactccatccatagccaagaaccaaaggacccacacgacctcatgttcacaattcaccggagcacaggcaccatcagcgtcatctccagtggcctggaccgggaaaaagtccctgagtacacactgaccatccaggccacagacatggatggggacggctccaccaccacggcagtggcagtagtggagatccttgatgccaatgacaatgctcccatgtttgacccccagaagtacgaggcccatgtgcctgagaatgcagtgggccatgaggtgcagaggctgacggtcactgatctggacgcccccaactcaccagcgtggcgtgccacctaccttatcatgggcggtgacgacggggaccattttaccatcaccacccaccctgagagcaaccagggcatcctgacaaccaggaagggtttggattttgaggccaaaaaccagcacaccctgtacgttgaagtgaccaacgaggccccttttgtgctgaagctcccaacctccacagccaccatagtggtccacgtggaggatgtgaatgaggcacctgtgtttgtcccaccctccaaagtcgttgaggtccaggagggcatccccactggggagcctgtgtgtgtctacactgcagaagaccctgacaaggagaatcaaaagatcagctaccgcatcctgagagacccagcagggtggctagccatggacccagacagtgggcaggtcacagctgtgggcaccctcgaccgtgaggatgagcagtttgtgaggaacaacatctatgaagtcatggtcttggccatggacaatggaagccctcccaccactggcacgggaacccttctgctaacactgattgatgtcaacgaccatggcccagtccctgagccccgtcagatcaccatctgcaaccaaagccctgtgcgccaggtgctgaacatcacggacaaggacctgtctccccacacctcccctttccaggcccagctcacagatgactcagacatctactggacggcagaggtcaacgaggaaggtgacacagtggtcttgtccctgaagaagttcctgaagcaggatacatatgacgtgcacctttctctgtctgaccatggcaacaaagagcagctgacggtgatcagggccactgtgtgcgactgccatggccatgtcgaaacctgccctggaccctggaaaggaggtttcatcctccctgtgctgggggctgtcctggctctgctgttcctcctgctggtgctgcttttgttggtgagaaagaagcggaagatcaaggagcccctcctactcccagaagatgacacccgtgacaacgtcttctactatggcgaagaggggggtggcgaagaggaccaggactatgacatcacccagctccaccgaggtctggaggccaggccggaggtggttctccgcaatgacgtggcaccaaccatcatcccgacacccatgtaccgtcctaggccagccaacccagatgaaatcggcaactttataattgagaacctgaaggcggctaacacagaccccacagccccgccctacgacaccctcttggtgttcgactatgagggcagcggctccgacgccgcgtccctgagctccctcacctcctccgcctccgaccaagaccaagattacgattatctgaacgagtggggcagccgcttcaagaagctggcagacatgtacggtggcggggaggacgactaggcggcctgcctgcagggctggggaccaaacgtcaggccacagagcatctccaaggggtctcagttcccccttcagctgaggacttcggagcttgtcaggaagtggccgtagcaacttggcggagacaggctatgagtctgacgttagagtggttgcttccttagcctttcaggatggaggaatgtgggcagtttgacttcagcactgaaaacctctccacctgggccagggttgcctcagaggccaagtttccagaagcctcttacctgccgtaaaatgctcaaccctgtgtcctgggcctgggcctgctgtgactgacctacagtggactttctctctggaatggaaccttcttaggcctcctggtgcaacttaatttttttttttaatgctatcttcaaaacgttagagaaagttcttcaaaagtgcagcccagagctgctgggcccactggccgtcctgcatttctggtttccagaccccaatgcctcccattcggatggatctctgcgtttttatactgagtgtgcctaggttgccccttattttttattttccctgttgcgttgctatagatgaagggtgaggacaatcgtgtatatgtactagaacttttttattaaagaaacttttcccaaaaaaaaaaaaaaaa

SEQ ID NO: 225 - DNA, 10316 bp, Homo sapiens; identical to SEQ ID NO: 194

SEQ ID NO: 226 - DNA, 2639 bp, Homo sapiens
ggcacgaggggccgacgcgagcgccgcgcttcgcttcagctgctagctggcccaagggaggcgaccgcggagggtggcgaggggcggccaggacccgcagccccggggccgggccggtccggaccgccagggagggcaggtcagtgggcagatcgcgtccgcgggattcaatctctgcccgctctgataacagtccttttccctggcgctcacttcgtgcctggcacccggctgggcgcctcaagaccgttgtctcttcgatcgcttctttggacttggcgaccatttcagagatgtcttccagaagtaccaaagatttaattaaaagtaagtggggatcgaagcctagtaactccaaatccgaaactacattagaaaaattaaagggagaaattgcacacttaaagacatcagtggatgaaatcacaagtgggaaaggaaagctgactgataaagagagacacagacttttggagaaaattcgagtccttgaggctgagaaggagaagaatgcttatcaactcacagagaaggacaaagaaatacagcgactgagagaccaactgaaggccagatatagtactaccgcattgcttgaacagctggaagagacaacgagagaaggagaaaggagggagcaggtgttgaaagccttatctgaagagaaagacgtattgaaacaacagttgtctgctgcaacctcacgaattgctgaacttgaaagcaaaaccaatacactccgtttatcacagactgtggctccaaactgcttcaactcatcaataaataatattcatgaaatggaaatacagctgaaagatgctctggagaaaaatcagcagtggctcgtgtatgatcagcagcgggaagtctatgtaaaaggacttttagcaaagatctttgagttggaaaagaaaacggaaacagctgctcattcactcccacagcagacaaaaaagcctgaatcagaaggttatcttcaagaagagaagcagaaatgttacaacgatctcttggcaagtgcaaaaaaagatcttgaggttgaacgacaaaccataactcagctgagttttgaactgagtgaatttcgaagaaaatatgaagaaacccaaaaagaagttcacaatttaaatcagctgttgtattcacaaagaagggcagatgtgcaacatctggaagatgataggcataaaacagagaagatacaaaaactcagggaagagaatgatattgctaggggaaaacttgaagaagagaagaagagatccgaagagctcttatctcaggtccagtttctttacacatctctgctaaagcagcaagaagaacaaacaagggtagctctgttggaacaacagatgcaggcatgtactttagactttgaaaatgaaaaactcgaccgtcaacatgtgcagcatcaattgcatgtaattcttaaggagctccgaaaagcaagaaatcaaataacacagttggaatccttgaaacagcttcatgagtttgccatcacagagccattagtcactttccaaggagagactgaaaacagagaaaaagttgccgcctcaccaaaaagtcccactgctgcactcaatgaaagcctggtggaatgtcccaagtgcaatatacagtatccagccactgagcatcgcgatctgcttgtccatgtggaatactgttcaaagtagcaaaataagtatttgttttgatattaaaagattcaatactgtattttctgttagcttgtgggcattttgaattatatatttcacattttgcataaaactgcctatctacctttgacactccagcatgctagtgaatcatgtatcttttaggctgctgtgcatttctcttggcagtgatacctccctgacatggttcatcatcaggctgcaatgacagaatgtggtgagcagcgtctactgagactactaacattttgcactgtcaaaatacttggtgaggaaaagatagctcaggttattgctaatgggttaatgcaccagcaagcaaaatattttatgttttgggggtttgaaaaatcaaagataattaaccaaggatcttaactgtgttcgcattttttatccaagcacttagaaaacctacaatcctaattttgatgtccattgttaagaggtggtgatagatactattttttttttcatattgtatagcggttattagaaaagttggggattttcttgatctttattgctgcttaccattgaaacttaacccagctgtgttccccaactctgttctgcgcacgaaacagtatctgtttgaggcataatcttaagtggccacacacaatgttttctcttatgttatctggcagtaactgtaacttgaattacattagcacattctgcttagctaaaattgttaaaataaactttaataaacccatgtagccctctcatttgattgacagtattttagttatttttggcattcttaaagctgggcaatgtaatgatcagatctttgtttgtctgaacaggtatttttatacatgctttttgtaaaccaaaaacttttaaatttcttcaggttttctaacatgcttaccactgggctactgtaaatgagaaaagaataaaattatttaatgttttaaaaaaaaaaaaaaa

SEQ ID NO: 227 - DNA, 2632 bp, Homo sapiens
ggcggctgagcctgagcggggatgtagaggcggcggcagcagaggcggcactggcggcaagagcagacgcccgagccgagcgagaagagcggcagagccttatcccctgaagccgggccccgcgtcccagccctgcccagcccgcgcccagccatgcgcgccgcctgctgagtccgggcgccgcacgctgagccctccgcccgcgagccgcgctcagctcgggggtgattagttgctttttgttgttttttaatttgggccgcggggagggggaggaggggcaggtgctgcaggctcccccccctccccgcctcgggccagccgcggcggcgcgactcgggctccggacccgggcactgctggcggctggagcggagcgcaccgcggcggtggtgcccagagcggagcgcagctccctgccccgcccctccccctcggcctcgcggcgacggcggcggtggcggcttggacgactcggagagccgagtgaagacatttccacctggacacctgaccatgtgcctgccctgagcagcgaggcccaccaggcatctctgttgtgggcagcagggccaggtcctggtctgtggaccctcggcagttggcaggctccctctgcagtggggtctgggcctcggccccaccatgtcgagcctcggcggtggctcccaggatgccggcggcagtagcagcagcagcaccaatggcagcggtggcagtggcagcagtggcccaaaggcaggagcagcagacaagagtgcagtggtggctgccgccgcaccagcctcagtggcagatgacacaccaccccccgagcgtcggaacaagagcggtatcatcagtgagcccctcaacaagagcctgcgccgctcccgcccgctctcccactactcttcttttggcagcagtggtggtagtggcggtggcagcatgatgggcggagagtctgctgacaaggccactgcggctgcagccgctgcctccctgttggccaatgggcatgacctggcggcggccatggcggtggacaaaagcaaccctacctcaaagcacaaaagtggtgctgtggccagcctgctgagcaaggcagagcgggccacggagctggcagccgagggacagctgacgctgcagcagtttgcgcagtccacagagatgctgaagcgcgtggtgcaggagcatctcccgctgatgagcgaggcgggtgctggcctgcctgacatggaggctgtggcaggtgccgaagccctcaatggccagtccgacttcccctacctgggcgctttccccatcaacccaggcctcttcattatgaccccggcaggtgtgttcctggccgagagcgcgctgcacatggcgggcctggctgagtaccccatgcagggagagctggcctctgccatcagctccggcaagaagaagcggaaacgctgcggcatgtgcgcgccctgccggcggcgcatcaactgcgagcagtgcagcagttgtaggaatcgaaagactggccatcagatttgcaaattcagaaaatgtgaggaactcaaaaagaagccttccgctgctctggagaaggtgatgcttccgacgggagccgccttccggtggtttcagtgacggcggcggaacccaaagctgccctctccgtgcaatgtcactgctcgtgtggtctccagcaagggattcgggcgaagacaaacggatgcacccgtctttagaaccaaaaatattctctcacagatttcattcctgtttttatatatatattttttgttgtcgttttaacatctccacgtccctagcataaaaagaaaaagaaaaaaatttaaactgctttttcggaagaacaacaacaaaaaagaggtaaagacgaatctataaagtaccgagacttcctgggcaaagaatggacaatcagtttccttcctgtgtcgatgtcgatgttgtctgtgcaggagatgcagtttttgtgtagagaatgtaaattttctgtaaccttttgaaatctagttactaataagcactactgtaatttagcacagtttaactccaccctcatttaaacttcctttgattctttccgaccatgaaatagtgcatagtttgcctggagaatccactcacgttcataaagagaatgttgatggcgccgtgtagaagccgctctgtatccatccacgcgtgcagagctgccagcagggagctcacagaaggggagggagcaccaggccagctgagctgcacccacagtcccgagactgggatcccccaccccaacagtgattttggaaaaaaaaatgaaagttctgttcgtttatccattgcgatctggggagccccatctcgatatttccaatcctggctacttttcttagagaaaataagtcctttttttctggccttgctaatggcaacagaagaaagggcttctttgcgtggtcccctgctggtgggggtgggtccccagggggccccctgcggcctgggcccccctgcccacggccagcttcctgctgatgaacatgctgtttgtattgttttaggaaaccaggctgttttgtgaataaaacgaatgcatgtttgtgtcacgaaaaaaaaaaaaaaaaaaaaaaaaaaaaaaaaaaaaaaaaaaaaa

SEQ ID NO: 228 - DNA, 5616 bp, Homo sapiens; identical to SEQ ID NO: 180

SEQ ID NO: 229 - DNA, 4816 bp, Homo sapiens; identical to SEQ ID NO: 88

SEQ ID NO: 230 - DNA, 6466 bp, Homo sapiens
atggtcataacagcctcctgtctaccgactcagaacggattttaccaaaactgaaaatgcaggctccatgctcagaagctctttaacaggctcgaaaggtccatgctcctttctcctgcccattctatagcataagaagacagtctctgagtgataatcttctcttcaagaagaagaaaactaggaaggagtaagcacaaagatctcttcacattctccgggactgcggtaccaaatatcagcacagcacttcttgaaaaaggatgtagattttaatctgaactttgaaccatcactgaggtggcccgccggtttctgagccttctgccctgcggggacacggtctgcaccctgcccgcggccacggaccatgaccatgaccctccacaccaaagcatctgggatggccctactgcatcagatccaagggaacgagctggagcccctgaaccgtccgcagctcaagatccccctggagcggcccctgggcgaggtgtacctggacagcagcaagcccgccgtgtacaactaccccgagggcgccgcctacgagttcaacgccgcggccgccgccaacgcgcaggtctacggtcagaccggcctcccctacggccccgggtctgaggctgcggcgttcggctccaacggcctggggggtttccccccactcaacagcgtgtctccgagcccgctgatgctactgcacccgccgccgcagctgtcgcctttcctgcagccccacggccagcaggtgccctactacctggagaacgagcccagcggctacacggtgcgcgaggccggcccgccggcattctacaggccaaattcagataatcgacgccagggtggcagagaaagattggccagtaccaatgacaagggaagtatggctatggaatctgccaaggagactcgctactgtgcagtgtgcaatgactatgcttcaggctaccattatggagtctggtcctgtgagggctgcaaggccttcttcaagagaagtattcaaggacataacgactatatgtgtccagccaccaaccagtgcaccattgataaaaacaggaggaagagctgccaggcctgccggctccgcaaatgctacgaagtgggaatgatgaaaggtgggatacgaaaagaccgaagaggagggagaatgttgaaacacaagcgccagagagatgatggggagggcaggggtgaagtggggtctgctggagacatgagagctgccaacctttggccaagcccgctcatgatcaaacgctctaagaagaacagcctggccttgtccctgacggccgaccagatggtcagtgccttgttggatgctgagccccccatactctattccgagtatgatcctaccagacccttcagtgaagcttcgatgatgggcttactgaccaacctggcagacagggagctggttcacatgatcaactgggcgaagagggtgccaggctttgtggatttgaccctccatgatcaggtccaccttctagaatgtgcctggctagagatcctgatgattggtctcgtctggcgctccatggagcacccagggaagctactgtttgctcctaacttgctcttggacaggaaccagggaaaatgtgtagagggcatggtggagatcttcgacatgctgctggctacatcatctcggttccgcatgatgaatctgcagggagaggagtttgtgtgcctcaaatctattattttgcttaattctggagtgtacacatttctgtccagcaccctgaagtctctggaagagaaggaccatatccaccgagtcctggacaagatcacagacactttgatccacctgatggccaaggcaggcctgaccctgcagcagcagcaccagcggctggcccagctcctcctcatcctctcccacatcaggcacatgagtaacaaaggcatggagcatctgtacagcatgaagtgcaagaacgtggtgcccctctatgacctgctgctggagatgctggacgcccaccgcctacatgcgcccactagccgtggaggggcatccgtggaggagacggaccaaagccacttggccactgcgggctctacttcatcgcattccttgcaaaagtattacatcacgggggaggcagagggtttccctgccacggtctgagagctccctggctcccacacggttcagataatccctgctgcattttaccctcatcatgcaccactttagccaaattctgtctcctgcatacactccggcatgcatccaacaccaatggctttctagatgagtggccattcatttgcttgctcagttcttagtggcacatcttctgtcttctgttgggaacagccaaagggattccaaggctaaatctttgtaacagctctctttcccccttgctatgttactaagcgtgaggattcccgtagctcttcacagctgaactcagtctatgggttggggctcagataactctgtgcatttaagctacttgtagagacccaggcctggagagtagacattttgcctctgataagcactttttaaatggctctaagaataagccacagcaaagaatttaaagtggctcctttaattggtgacttggagaaagctaggtcaagggtttattatagcaccctcttgtattcctatggcaatgcatccttttatgaaagtggtacaccttaaagcttttatatgactgtagcagagtatctggtgattgtcaattcattccccctataggaatacaaggggcacacagggaaggcagatcccctagttggcaagactattttaacttgatacactgcagattcagatgtgctgaaagctctgcctctggctttccggtcatgggttccagttaattcatgcctcccatggacctatggagagcagcaagttgatcttagttaagtctccctatatgagggataagttcctgatttttgtttttatttttgtgttacaaaagaaagccctccctccctgaacttgcagtaaggtcagcttcaggacctgttccagtgggcactgtacttggatcttcccggcgtgtgtgtgccttacacaggggtgaactgttcactgtggtgatgcatgatgagggtaaatggtagttgaaaggagcaggggccctggtgttgcatttagccctggggcatggagctgaacagtacttgtgcaggattgttgtggctactagagaacaagagggaaagtagggcagaaactggatacagttctgaggcacagccagacttgctcagggtggccctgccacaggctgcagctacctaggaacattccttgcagaccccgcattgccctttgggggtgccctgggatccctggggtagtccagctcttcttcatttcccagcgtggccctggttggaagaagcagctgtcacagctgctgtagacagctgtgttcctacaattggcccagcaccctggggcacgggagaagggtggggaccgttgctgtcactactcaggctgactggggcctggtcagattacgtatgcccttggtggtttagagataatccaaaatcagggtttggtttggggaagaaaatcctcccccttcctcccccgccccgttccctaccgcctccactcctgccagctcatttccttcaatttcctttgacctataggctaaaaaagaaaggctcattccagccacagggcagccttccctgggcctttgcttctctagcacaattatgggttacttcctttttcttaacaaaaaagaatgtttgatttcctctgggtgaccttattgtctgtaattgaaaccctattgagaggtgatgtctgtgttagccaatgacccaggtgagctgctcgggcttctcttggtatgtcttgtttggaaaagtggatttcattcatttctgattgtccagttaagtgatcaccaaaggactgagaatctgggagggcaaaaaaaaaaaaaaagtttttatgtgcacttaaatttggggacaattttatgtatctgtgttaaggatatgtttaagaacataattcttttgttgctgtttgtttaagaagcaccttagtttgtttaagaagcaccttatatagtataatatatatttttttgaaattacattgcttgtttatcagacaattgaatgtagtaattctgttctggatttaatttgactgggttaacatgcaaaaaccaaggaaaaatatttagtttttttttttttttttgtatacttttcaagctaccttgtcatgtatacagtcatttatgcctaaagcctggtgattattcatttaaatgaagatcacatttcatatcaacttttgtatccacagtagacaaaatagcactaatccagatgcctattgttggatactgaatgacagacaatcttatgtagcaaagattatgcctgaaaaggaaaattattcagggcagctaattttgcttttaccaaaatatcagtagtaatatttttggacagtagctaatgggtcagtgggttctttttaatgtttatacttagattttcttttaaaaaaattaaaataaaacaaaaaaaaatttctaggactagacgatgtaataccagctaaagccaaacaattatacagtggaaggttttacattattcatccaatgtgtttctattcatgttaagatactactacatttgaagtgggcagagaacatcagatgattgaaatgttcgcccaggggtctccagcaactttggaaatctctttgtatttttacttgaagtgccactaatggacagcagatattttctggctgatgttggtattgggtgtaggaacatgatttaaaaaaaaactcttgcctctgctttcccccactctgaggcaagttaaaatgtaaaagatgtgatttatctggggggctcaggtatggtggggaagtggattcaggaatctggggaatggcaaatatattaagaagagtattgaaagtatttggaggaaaatggttaattctgggtgtgcaccagggttcagtagagtccacttctgccctggagaccacaaatcaactagctccatttacagccatttctaaaatggcagcttcagttctagagaagaaagaacaacatcagcagtaaagtccatggaatagctagtggtctgtgtttcttttcgccattgcctagcttgccgtaatgattctataatgccatcatgcagcaattatgagaggctaggtcatccaaagagaagaccctatcaatgtaggttgcaaaatctaacccctaaggaagtgcagtctttgatttgatttccctagtaaccttgcagatatgtttaaccaagccatagcccatgccttttgagggctgaacaaataagggacttactgataatttacttttgatcacattaaggtgttctcaccttgaaatcttatacactgaaatggccattgatttaggccactggcttagagtactccttcccctgcatgacactgattacaaatactttcctattcatactttccaattatgagatggactgtgggtactgggagtgatcactaacaccatagtaatgtctaatattcacaggcagatctgcttggggaagctagttatgtgaaaggcaaatagagtcatacagtagctcaaaaggcaaccataattctctttggtgcaggtcttgggagcgtgatctagattacactgcaccattcccaagttaatcccctgaaaacttactctcaactggagcaaatgaactttggtcccaaatatccatcttttcagtagcgttaattatgctctgtttccaactgcatttcctttccaattgaattaaagtgtggcctcgtttttagtcatttaaaattgttttctaagtaattgctgcctctattatggcacttcaattttgcactgtcttttgagattcaagaaaaatttctattcttttttttgcatccaattgtgcctgaacttttaaaatatgtaaatgctgccatgttccaaacccatcgtcagtgtgtgtgtttagagctgtgcaccctagaaacaacatattgtcccatgagcaggtgcctgagacacagacccctttgcattcacagagaggtcattggttatagagacttgaattaataagtgacattatgccagtttctgttctctcacaggtgataaacaatgctttttgtgcactacatactcttcagtgtagagctcttgttttatgggaaaaggctcaaatgccaaattgtgtttgatggattaatatgcccttttgccgatgcatactattactgatgtgactcggttttgtcgcagctttgctttgtttaatgaaacacacttgtaaacctcttttgcactttgaaaaagaatccagcgggatgctcgagcacctgtaaacaattttctcaacctatttgatgttcaaataaagaattaaactaaa

SEQ ID NO: 231 - DNA, 3478 bp, Homo sapiens
aaattgaaaggtcagcctttcgcgcgctgtgtaggcaagttacccgtgttctgcgttgccggccgtgggtgctctggccacagtgagttaggggcgtcggagcgggtttctccaaccgcaatcggctccgctcaaggggaggaggagagtcccttctcggaaggcctaaggaaacgtgtcgtctggaatgggcttgggggccacgcctgcacatctccgcgagacagagggataaagtgaagatggtgctgttattgttacctcgagtgccacatgcgacctctgagatatgtacacagtcattcttactatcgcactcagccattcttactacgctaaagaagaaataattattcgaggatatttgcctggcccagaagaaacttatgtaaatttcatgaactattatatccgttttcctcggagtgagagaaaactctttttagatatcatctgagagaactagtgaatcccagtcactgagtggagttgagagtctaagaacctctgaaatttgagaactgctggaccagagcctttagagctctgataaggtgtcaacagggtagttaatttggcaccatggggatacagggattgctacaatttatcaaagaagcttcagaacccatccatgtgaggaagtataaagggcaggtagtagctgtggatacatattgctggcttcacaaaggagctattgcttgtgctgaaaaactagccaaaggtgaacctactgataggtatgtaggattttgtatgaaatttgtaaatatgttactatctcatgggatcaagcctattctcgtatttgatggatgtactttaccttctaaaaaggaagtagagagatctagaagagaaagacgacaagccaatcttcttaagggaaagcaacttcttcgtgaggggaaagtctcggaagctcgagagtgtttcacccggtctatcaatatcacacatgccatggcccacaaagtaattaaagctgcccggtctcagggggtagattgcctcgtggctccctatgaagctgatgcgcagttggcctatcttaacaaagcgggaattgtgcaagccataattacagaggactcggatctcctagcttttggctgtaaaaaggtaattttaaagatggaccagtttggaaatggacttgaaattgatcaagctcggctaggaatgtgcagacagcttggggatgtattcacggaagagaagtttcgttacatgtgtattctttcaggttgtgactacctgtcatcactgcgtgggattggattagcaaaggcatgcaaagtcctaagactagccaataatccagatatagtaaaggttatcaagaaaattggacattatctcaagatgaatatcacggtaccagaggattacatcaacgggtttattcgggccaacaataccttcctctatcagctagtttttgatcccatcaaaaggaaacttattcctctgaacgcctatgaagatgatgttgatcctgaaacactaagctacgctgggcaatatgttgatgattccatagctcttcaaatagcacttggaaataaagatataaatacttttgaacagatcgatgactacaatccagacactgctatgcctgcccattcaagaagtcatagttgggatgacaaaacatgtcaaaagtcagctaatgttagcagcatttggcataggaattactctcccagaccagagtcgggtactgtttcagatgccccacaattgaaggaaaatccaagtactgtgggagtggaacgagtgattagtactaaagggttaaatctcccaaggaaatcatccattgtgaaaagaccaagaagtgcagagctgtcagaagatgacctgttgagtcagtattctctttcatttacgaagaagaccaagaaaaatagctctgaaggcaataaatcattgagcttttctgaagtgtttgtgcctgacctggtaaatggacctactaacaaaaagagtgtaagcactccacctaggacgagaaataaatttgcaacatttttacaaaggaaaaatgaagaaagtggtgcagttgtggttccagggaccagaagcaggtttttttgcagttcagattctactgactgtgtatcaaacaaagtgagcatccagcctctggatgaaactgctgtcacagataaagagaacaatctgcatgaatcagagtatggagaccaagaaggcaagagactggttgacacagatgtagcacgtaattcaagtgatgacattccgaataatcatattccaggtgatcatattccagacaaggcaacagtgtttacagatgaagagtcctactcttttgagagcagcaaatttacaaggaccatttcaccacccactttgggaacactaagaagttgttttagttggtctggaggtcttggagatttttcaagaacgccgagcccctctccaagcacagcattgcagcagttccgaagaaagagcgattcccccacctctttgcctgagaataatatgtctgatgtgtcgcagttaaagagcgaggagtccagtgacgatgagtctcatcccttacgagaagaggcatgttcttcacagtcccaggaaagtggagaattctcactgcagagttcaaatgcatcaaagctttctcagtgctctagtaaggactctgattcagaggaatctgattgcaatattaagttacttgacagtcaaagtgaccagacctccaagctacgtttatctcatttctcaaaaaaagacacacctctaaggaacaaggttcctgggctatataagtccagttctgcagactctctttctacaaccaagatcaaacctctaggacctgccagagccagtgggctgagcaagaagccggcaagcatccagaagagaaagcatcataatgccgagaacaagccggggttacagatcaaactcaatgagctctggaaaaactttggatttaaaaaagattctgaaaagcttcctccttgtaagaaacccctgtccccagtcagagataacatccaactaactccagaagcggaagaggatatatttaacaaacctgaatgtggccgtgttcaaagagcaatattccagtaaatgcagactgctgcaaagcttttgcctgcaagagaatctgatcaatttgaagtccctgtttgggaatgaggcacttatcagcatgaagaattttttctcattctgtgccattttaaaaatagaatacattttgtatattaactttataattgggttgtggtttttttgctcagctttttatatttttataagaagctaaatagaagaataattgtatctctgacaggtttttggaggttttagtgttaattgggaaaatcctctggagtttataaaagtctactctaaatatttctgtaatgttgtcaagtagaaagatagtaaatggagaaactacaaaaaaaaaaaaaaaaaa

SEQ ID NO: 232 - DNA, 5192 bp, Homo sapiens
ccatgacctgccttgagaaggggcaggggaagccagatggactggaagtggagtggcagtgaccaaggaggaggaggtgtgataggcttcccacgcagggtagatccagagacaccagtgccacccataggcccctaggactgcagtggtcacccgattcctttgtcccagctgagactcagttctgagtgttctattttggggaacagaggcgtccttggtagcatttggaagaggatagccagctggggtgtgtgtacatcacagcctgacagtaacagcatccgaaccagaggtgactggctaagggcagacccagggcaacaggttaaccgttctagggccgggcacagggaggagaacattccaacactctgtgtgcccagtgccgacgcacgttctctcttttatcctcaaaacagtcctatgaggatataagccagagagagacagagacaaggaattacaagttggtgagagtcaggatttgaacttggctctggcagatggaaaattagggtctgtattctttacaaaaccgtgtgtgcctcagatggagttggtgcataacaagcagaggtatccagggtcgcggtcctgcttgccacggaaggggccgccttgtcagttgtgaccacccagccctggaaatgtcagtaatgctgtaaggagtggggatcggatcagatgccatccagatgctgaagtttgaccttgtgtcatttttcactttcttttttggctcttctgcaatcaattcatttatttagcaaaaaagaaattatgtgtgccgagagcatgcagaagatatgtctccgttctctgcttccctccaaaaaagaatcccaaaactgctttctgtgaacgtgtgccagggtcccagcaggactcagggagagcaggaagcccagcccagaccccttgcacaacctaccgtggggaggccttaggctctggctactacagagctggttccagtctgcactgccacagcctggccagggacttggacacatctgctggccacttcctgtctcagtttccttatctgcaaaataagggaaaagcccccacaaaggtgcacgtgtagcaggagctcttttccctccctattttaggaaggcagttggtgggaagtccagcttgggtccctgagagctgtgagaaggagatgcggctgctgctggccctgttgggggtcctgctgagtgtgcctgggcctccagtcttgtccctggaggcctctgaggaagtggagcttggtatggcttctgaggtgggagagggtggcaggggtgggaagagtgggcaccaggagggggctgctgggctgagcaaagctggaaaggatccttgcccaggccctgagaaggtggcggcagggcagggctcaaccactgagactcagtcagtgcctggcttccagcaagcattcatctatcactgtgtctgcgagagaggactggccttgcagggcgcagggccctaagctgggctgcagagctggtggtgagctccttgcctgggtgtgtgtgcgtgtgtgtgtgtgttctgtgcactgggtgtgtgacctaggaggtccaggcagcatgtgtggtataagcattatgagggtgatatgccccggtgcagcatgaccctgtatgtggcaccaacagcatgtgccttgtgtgtgtgtgtgtccgtatgtgtgtgtgtgtatgcgtgtgtgtgtgtgtgtgtgtgtgtcttggccactgtcatgtgcactaaatgctgtgtgtgtgacatgccccaagagtgtggcatttgccctgggtgtggcatccgcagcatgtggctgtgtgggtgtcaaggagtggtggctccttcagcatgcgttgcgaagtgcttgtgccctgcatgtgcggtgtgttctctgtacacaggaggctgcctcagatggggctgcggggtctgctgacctctgccctctgcccacagagccctgcctggctcccagcctggagcagcaagagcaggagctgacagtagcccttgggcagcctgtgcggctgtgctgtgggcgggctgagcgtggtggccactggtacaaggagggcagtcgcctggcacctgctggccgtgtacggggctggaggggccgcctagagattgccagcttcctacctgaggatgctggccgctacctctgcctggcacgaggctccatgatcgtcctgcagaatctcaccttgattacaggtgactccttgacctccagcaacgatgatgaggaccccaagtcccatagggacctctcgaataggcacagttacccccagcaaggtcagtaggtctccaaggacttgtgtccccgctgctgctcatctgatcactgagaagaggaggcctgtgtgggaacacacggtcattctaggggccttcccctgccctccagcaccctactggacacacccccagcgcatggagaagaaactgcatgcagtacctgcggggaacaccgtcaagttccgctgtccagctgcaggcaaccccacgcccaccatccgctggcttaaggatggacaggcctttcatggggagaaccgcattggaggcattcggctgcgccatcagcactggagtctcgtgatggagagcgtggtgccctcggaccgcggcacatacacctgcctggtagagaacgctgtgggcagcatccgttataactacctgctagatgtgctggagcggtccccgcaccggcccatcctgcaggccgggctcccggccaacaccacagccgtggtgggcagcgacgtggagctgctgtgcaaggtgtacagcgatgcccagccccacatccagtggctgaagcacatcgtcatcaacggcagcagcttcggagccgacggtttcccctatgtgcaagtcctaaagactgcagacatcaatagctcagaggtggaggtcctgtacctgcggaacgtgtcagccgaggacgcaggcgagtacacctgcctcgcaggcaattccatcggcctctcctaccagtctgcctggctcacggtgctgccaggtgagcacctgaagggccaggagatgctgcgagatgcccctctgggccagcagtgggggctgtggcctgttgggtggtcagtctctgttggcctgtggggtctggcctggggggcagtgtgtggatttgtgggtttgagctgtatgacagcccctctgtgcctctccacacgtggccgtccatgtgaccgtctgctgaggtgtgggtgcctgggactgggcataactacagcttcctccgtgtgtgtccccacatatgttgggagctgggagggactgagttagggtgcacggggcggccagtctcaccactgaccagtttgtctgtctgtgtgtgtccatgtgcgagggcagaggaggaccccacatggaccgcagcagcgcccgaggccaggtatacggacatcatcctgtacgcgtcgggctccctggccttggctgtgctcctgctgctggccaggctgtatcgagggcaggcgctccacggccggcacccccgcccgcccgccactgtgcagaagctctcccgcttccctctggcccgacagttctccctggagtcaggctcttccggcaagtcaagctcatccctggtacgaggcgtgcgtctctcctccagcggccccgccttgctcgccggcctcgtgagtctagatctacctctcgacccactatgggagttcccccgggacaggctggtgcttgggaagcccctaggcgagggctgctttggccaggtagtacgtgcagaggcctttggcatggaccctgcccggcctgaccaagccagcactgtggccgtcaagatgctcaaagacaacgcctctgacaaggacctggccgacctggtctcggagatggaggtgatgaagctgatcggccgacacaagaacatcatcaacctgcttggtgtctgcacccaggaagggcccctgtacgtgatcgtggagtgcgccgccaagggaaacctgcgggagttcctgcgggcccggcgccccccaggccccgacctcagccccgacggtcctcggagcagtgaggggccgctctccttcccagtcctggtctcctgcgcctaccaggtggcccgaggcatgcagtatctggagtcccggaagtgtatccaccgggacctggctgcccgcaatgtgctggtgactgaggacaatgtgatgaagattgctgactttgggctggcccgcggcgtccaccacattgactactataagaaaaccagcaacggccgcctgcctgtgaagtggatggcgcccgaggccttgtttgaccgggtgtacacacaccagagtgacgtgtggtcttttgggatcctgctatgggagatcttcaccctcgggggctccccgtatcctggcatcccggtggaggagctgttctcgctgctgcgggagggacatcggatggaccgacccccacactgccccccagagctgtacgggctgatgcgtgagtgctggcacgcagcgccctcccagaggcctaccttcaagcagctggtggaggcgctggacaaggtcctgctggccgtctctgaggagtacctcgacctccgcctgaccttcggaccctattccccctctggtggggacgccagcagcacctgctcctccagcgattctgtcttcagccacgaccccctgccattgggatccagctccttccccttcgggtctggggtgcagacatgagcaaggctcaaggctgtgcaggcacataggctggtggccttgggccttggggctcagccacagcctgacacagtgctcgaccttgatagcatggggcccctggcccagagttgctgtgccgtgtccaagggccgtgcccttgcccttggagctgccgtgcctgtgtcctgatggcccaaatgtcagggttctgctcggcttcttggaccttggcgcttagtccccatcccgggtttggctgagcctggctggagagctgctatgctaaacctcctgcctcccaataccagcaggaggttctgggcctctgaaccccctttccccacacctccccctgctgctgctgccccagcgtcttgacgggagcattggcccctgagcccagagaagctggaagcctgccgaaaacaggagcaaatggcgttttataaattatttttttgaaat

SEQ ID NO: 233 - DNA, 3124 bp, Homo sapiens
taagatccacatcagctcaactgcacttgcctcgcagaggcagcccgctcacttcccgcggaggcgctccccggcgccgcgctccgcggcagccgcctgcccccggcgctgcccccgcccgccgcgccgccgccgccgccgcgcacgccgcgccccgcagctctgggcttcctcttcgcccgggtggcgttgggcccgcgcgggcgctcgggtgactgcagctgctcagctcccctcccccgccccgcgccgcgcggccgcccgtcgcttcgcacagggctggatggttgtattgggcagggtggctccaggatgttaggaactgtgaagatggaagggcatgaaaccagcgactggaacagctactacgcagacacgcaggaggcctactcctccgtcccggtcagcaacatgaactcaggcctgggctccatgaactccatgaacacctacatgaccatgaacaccatgactacgagcggcaacatgaccccggcgtccttcaacatgtcctatgccaacccgggcctaggggccggcctgagtcccggcgcagtagccggcatgccggggggctcggcgggcgccatgaacagcatgactgcggccggcgtgacggccatgggtacggcgctgagcccgagcggcatgggcgccatgggtgcgcagcaggcggcctccatgaatggcctgggcccctacgcggccgccatgaacccgtgcatgagccccatggcgtacgcgccgtccaacctgggccgcagccgcgcgggcggcggcggcgacgccaagacgttcaagcgcagctacccgcacgccaagccgccctactcgtacatctcgctcatcaccatggccatccagcaggcgcccagcaagatgctcacgctgagcgagatctaccagtggatcatggacctcttcccctattaccggcagaaccagcagcgctggcagaactccatccgccactcgctgtccttcaatgactgcttcgtcaaggtggcacgctccccggacaagccgggcaagggctcctactggacgctgcacccggactccggcaacatgttcgagaacggctgctacttgcgccgccagaagcgcttcaagtgcgagaagcagccgggggccggcggcgggggcgggagcggaagcgggggcagcggcgccaagggcggccctgagagccgcaaggacccctctggcgcctctaaccccagcgccgactcgcccctccatcggggtgtgcacgggaagaccggccagctagagggcgcgccggcccccgggcccgccgccagcccccagactctggaccacagtggggcgacggcgacagggggcgcctcggagttgaagactccagcctcctcaactgcgccccccataagctccgggcccggggcgctggcctctgtgcccgcctctcacccggcacacggcttggcaccccacgagtcccagctgcacctgaaaggggacccccactactccttcaaccacccgttctccatcaacaacctcatgtcctcctcggagcagcagcataagctggacttcaaggcatacgaacaggcactgcaatactcgccttacggctctacgttgcccgccagcctgcctctaggcagcgcctcggtgaccaccaggagccccatcgagccctcagccctggagccggcgtactaccaaggtgtgtattccagacccgtcctaaacacttcctagctcccgggactggggggtttgtctggcatagccatgctggtagcaagagagaaaaaatcaacagcaaacaaaaccacacaaaccaaaccgtcaacagcataataaaatcccaacaactatttttatttcatttttcatgcacaacctttcccccagtgcaaaagactgttactttattattgtattcaaaattcattgtgtatattactacaaagacaaccccaaaccaatttttttcctgcgaagtttaatgatccacaagtgtatatatgaaattctcctccttccttgcccccctctctttcttccctctttcccctccagacattctagtttgtggagggttatttaaaaaaacaaaaaaggaagatggtcaagtttgtaaaatatttgtttgtgctttttccccctccttacctgaccccctacgagtttacaggtctgtggcaatactcttaaccataagaattgaaatggtgaagaaacaagtatacactagaggctcttaaaagtattgaaagacaatactgctgttatatagcaagacataaacagattataaacatcagagccatttgcttctcagtttacatttctgatacatgcagatagcagatgtctttaaatgaaatacatgtatattgtgtatggacttaattatgcacatgctcagatgtgtagacatcctccgtatatttacataacatatagaggtaatagataggtgatatacatgatacattctcaagagttgcttgaccgaaagttacaaggaccccaacccctttgtcctctctacccacagatggccctgggaatcaattcctcaggaattgccctcaagaactctgcttcttgctttgcagagtgccatggtcatgtcattctgaggtcacataacacataaaattagtttctatgagtgtataccatttaaagaatttttttttcagtaaaagggaatattacaatgttggaggagagataagttatagggagctggatttcaaaacgtggtccaagattcaaaaatcctattgatagtggccattttaatcattgccatcgtgtgcttgtttcatccagtgttatgcactttccacagttggacatggtgttagtatagccagacgggtttcattattatttctctttgctttctcaatgttaatttattgcatggtttattctttttctttacagctgaaattgctttaaatgatggttaaaattacaaattaaattgttaatttttatcaatgtgattgtaattaaaaatattttgatttaaataacaaaaataataccagattttaagccgtggaaaatgttcttgatcatttgcagttaaggactttaaataaatcaaatgttaacaaaaaaaaaaaaaaaa

SEQ ID NO: 234 - DNA, 3452 bp, Homo sapiens; identical to SEQ ID NO: 131

SEQ ID NO: 235 - DNA, 1749 bp, Homo sapiens
gtggcctcgaggtggtggcagggccgccccctgcagtccggagacgaacgcacggaccgggcctccggaggcaggttcggctggaaggaaccgctctcgcttcgtcctacacttgcgcaaatgtctccgagcttactcacatagcatattggtatatcaaaatgaaatgcaaggaaccaaaaataacataattgaaggcagtaaaagtgaaattaaataggaagatcatcagtcaaggaagacccactggagaggacagaaaatgaagcagtgttttatcatgtgtatttcagcaggtcttcttgaaatttaactaaaaatatgactgctctctcttcagagaactgctcttttcagtaccagttacgtcaaacaaaccagcccctagacgttaactatctgctattcttgatcatacttgggaaaatattattaaatatccttacactaggaatgagaagaaaaaacacctgtcaaaattttatggaatatttttgcatttcactagcattcgttgatcttttacttttggtaaacatttccattatattgtatttcagggattttgtacttttaagcattaggttcactaaataccacatctgcctatttactcaaattatttcctttacttatggctttttgcattatccagttttcctgacagcttgtatagattattgcctgaatttctctaaaacaaccaagctttcatttaagtgtcaaaaattattttatttctttacagtaattttaatttggatttcagtccttgcttatgttttgggagacccagccatctaccaaagcctgaaggcacagaatgcttattctcgtcactgtcctttctatgtcagcattcagagttactggctgtcatttttcatggtgatgattttatttgtagctttcataacctgttgggaagaagttactactttggtacaggctatcaggataacttcctatatgaatgaaactatcttatattttcctttttcatcccactccagttatactgtgagatctaaaaaaatattcttatccaagctcattgtctgttttctcagtacctggttaccatttgtactacttcaggtaatcattgttttacttaaagttcagattccagcatatattgagatgaatattccctggttatactttgtcaatagttttctcattgctacagtgtattggtttaattgtcacaagcttaatttaaaagacattggattacctttggatccatttgtcaactggaagtgctgcttcattccacttacaattcctaatcttgagcaaattgaaaagcctatatcaataatgatttgttaatattattaattaaaagttacagctgtcataagatcataattttatgaacagaaagaactcaggacatattaaaaaataaactgaactaaaacaacttttgccccctgactgatagcatttcagaatgtgtcttttgaagggctataccagttattaaatagtgttttattttaaaaacaaaataattccaagaagtttttatagttattcagggacactatattacaaatattactttgttattaacacaaaaagtgataagagttaacatttggctatactgatgtttgtgttactcaaaaaaactactggatgcaaactgttatgtaaatctgagatttcactgacaactttaagatatcaacctaaacatttttattaaatgttcaaatgtaagcaagaaaaaaaaaa

SEQ ID NO: 236 - DNA, 2285 bp, Homo sapiens; identical to SEQ ID NO: 112

SEQ ID NO: 237 - DNA, 935 bp, Homo sapiens; identical to SEQ ID NO: 148

SEQ ID NO: 238 - DNA, 2896 bp, Homo sapiens; identical to SEQ ID NO: 129

SEQ ID NO: 239 - DNA, 2209 bp, Homo sapiens
actgcgcgcgtcgtgcgtaatgacgtcagcgccggcggagaatttcaaattcgaacggctttggcgggccgaggaaggacctggtgttttgatgaccgctgtcctgtctagcagatacttgcacggtttacagaaattcggtccctgggtcgtgtcaggaaactggaaaaaaggtcataagcatgaagcgcagttcagtttccagcggtggtgctggccgcctctccatgcaggagttaagatcccaggatgtaaataaacaaggcctctatacccctcaaaccaaagagaaaccaacctttggaaagttgagtataaacaaaccgacatctgaaagaaaagtctcgctatttggcaaaagaactagtggacatggatcccggaatagtcaacttggtatattttccagttctgagaaaatcaaggacccgagaccacttaatgacaaagcattcattcagcagtgtattcgacaactctgtgagtttcttacagaaaatggttatgcacataatgtgtccatgaaatctctacaagctccctctgttaaagacttcctgaagatcttcacatttctttatggcttcctgtgcccctcatacgaacttcctgacacaaagtttgaagaagaggttccaagaatctttaaagaccttgggtatccttttgcactatccaaaagctccatgtacacagtgggggctcctcatacatggcctcacattgtggcagccttagtttggctaatagactgcatcaagatacatactgccatgaaagaaagctcacctttatttgatgatgggcagccttggggagaagaaactgaagatggaattatgcataataagttgtttttggactacaccataaaatgctatgagagttttatgagtggtgccgacagctttgatgagatgaatgcagagctgcagtcaaaactgaaggatttatttaatgtggatgcttttaagctggaatcattagaagcaaaaaacagagcattgaatgaacagattgcaagattggaacaagaaagagaaaaagaaccgaatcgtctagagtcgttgagaaaactgaaggcttccttacaaggagatgttcaaaagtatcaggcatacatgagcaatttggagtctcattcagccattcttgaccagaaattaaatggtctcaatgaggaaattgctagagtagaactagaatgtgaaacaataaaacaggagaacactcgactacagaatatcattgacaaccagaagtactcagttgcagacattgagcgaataaatcatgaaagaaatgaattgcagcagactattaataaattaaccaaggacctggaagctgaacaacagaagttgtggaatgaggagttaaaatatgccagaggcaaagaagcgattgaaacacaattagcagagtatcacaaattggctagaaaattaaaacttattcctaaaggtgctgagaattccaaaggttatgactttgaaattaagtttaatcccgaggctggtgccaactgccttgtcaaatacagggctcaagtttatgtacctcttaaggaactcctgaatgaaactgaagaagaaattaataaagccctaaataaaaaaatgggtttggaggatactttagaacaattgaatgcaatgataacagaaagcaagagaagtgtgagaactctgaaagaagaagttcaaaagctggatgatctttaccaacaaaaaattaaggaagcagaggaagaggatgaaaaatgtgccagtgagcttgagtccttggagaaacacaagcacctgctagaaagtactgttaaccaggggctcagtgaagctatgaatgaattagatgctgttcagcgggaataccaactagttgtgcaaaccacgactgaagaaagacgaaaagtgggaaataacttgcaacgtctgttagagatggttgctacacatgttgggtctgtagagaaacatcttgaggagcagattgctaaagttgatagagaatatgaagaatgcatgtcagaagatctctcggaaaatattaaagagattagagataagtatgagaagaaagctactctaattaagtcttctgaagaatgaagataaaatgttgatcatgtatatatatccatagtgaataaaattgtctcagtaaagtgtaaaaaaaaaaaaaaaaaaaaaaaaaaaaaaaaaaaaaa

SEQ ID NO: 240 - DNA, 1740 bp, Homo sapiens
ctccctcctctgcaccatgactacctgcagccgccagttcacctcctccagctccatgaagggctcctgcggcatcgggggcggcatcgggggcggctccagccgcatctcctccgtcctggccggagggtcctgccgcgcccccagcacctacgggggcggcctgtctgtctcatcctcccgcttctcctctgggggagcctatgggttggggggcggctatggcggtggcttcagcagcagcagcagcagctttggtagtggctttgggggaggatatggtggtggccttggtgctggcttgggtggtggctttggtggtggctttgctggtggtgatgggcttctggtgggcagtgagaaggtgaccatgcagaacctcaacgaccgcctggcctcctacctggacaaggtgcgtgctctggaggaggccaacgccgacctggaagtgaagatccgtgactggtaccagaggcagcggcctgctgagatcaaagactacagtccctacttcaagaccattgaggacctgaggaacaagattctcacagccacagtggacaatgccaatgtccttctgcagattgacaatgcccgtctggccgcggatgacttccgcaccaagtatgagacagagttgaacctgcgcatgagtgtggaagccgacatcaatggcctgcgcagggtgctggacgaactgaccctggccagagctgacctggagatgcagattgagagcctgaaggaggagctggcctacctgaagaagaaccacgaggaggagatgaatgccctgagaggccaggtgggtggagatgtcaatgtggagatggacgctgcacctggcgtggacctgagccgcattctgaacgagatgcgtgaccagtatgagaagatggcagagaagaaccgcaaggatgccgaggaatggttcttcaccaagacagaggagctgaaccgcgaggtggccaccaacagcgagctggtgcagagcggcaagagcgagatctcggagctccggcgcaccatgcagaacctggagattgagctgcagtcccagctcagcatgaaagcatccctggagaacagcctggaggagaccaaaggtcgctactgcatgcagctggcccagatccaggagatgattggcagcgtggaggagcagctggcccagctccgctgcgagatggagcagcagaaccaggagtacaagatcctgctggacgtgaagacgcggctggagcaggagatcgccacctaccgccgcctgctggagggcgaggacgcccacctctcctcctcccagttctcctctggatcgcagtcatccagagatgtgacctcctccagccgccaaatccgcaccaaggtcatggatgtgcacgatggcaaggtggtgtccacccacgagcaggtccttcgcaccaagaactgaggctgcccagccccgctcaggcctaggaggccccccgtgtggacacagatcccactggaagatcccctctcctgcccaagcacttcacagctggaccctgcttcaccctcaccccctcctggcaatcaatacagcttcattatctgagttgcataaaaaaaaaaaaaaaaaaaaaaaaaaaaaaaaaaaaaaaaaaaaaaaaaaaaaaaaaaaaaaaaaaaaaaaaaaaaaaaaaaaaaaaaaaaaaaaaaaaaaaaaaaaaaaaaaaaaaaaaaaaaaaaaaaaaaaaaaaaaaaaaaaaaaaa

SEQ ID NO: 241 - DNA, 2895 bp, Homo sapiens
ctcttttgcaggggccgttcctcggggcatgacgctggctcctgcacagatcctgctcctctgtggccttcctgggctgccctcccctcctccgggactgctctggactgacactgctcaggttcggattccctcaaagactttgggagacaagacttggtcccccttttacaaacaagggaacggaggctctagaactgacttcctgaaaggcttggatccaaagctccctcagttcagcggccacgtctatttccctcagacacagggatccttgaacctgtgggctgtatctccccgcggacttggaagaatcccaagagagtggggctcccacaggctggagtgcaatggtgtgatctcggctcactgcaacctccacctcccaggttcaagctattctcctgcctcagcctcctgagtagctgggattacagatcctggtggctgtggtcggtaattccagcttcgtgctggctacaggtggatgatgcccacctggctgccgatgacctctgcaccaagtgaggctgggtctctggagctgccccaggggctggacaagctgaccctggccggggccaacctggagatgcagattgagaacctcaaggaggacctggtctacctgaagaagaaccacaagcaggaaatgaacgtcctttgaggtcaggtggatgaggatgtcagtgtgaagatggacactgtgcctggagtgaacctgagctgcatcctgaatgagatgcgtgaccaggacaagacattggtggagaagagctgcaaggatgccgagggctggttcttcagcatggtgggtggccgtgcgtaagcaggtgtgtacacgtgtgggcacatgtgctgcatgctggtgcagctggagcactggcagatccacaggctgtcccagttggaaggacttttggaaaccagttggaccagcccctcatgttttagatgtaaaacgtgaggctcagagaggactcaagctcacacagcccttcactgtggcctgcaaaatagatccaggtctctacaagtctggtcttgggtttccaccacagctgtttacaggatgtgcgtatttgaatacatatgtatacccttggcaagcacaggctgagtatctccggtatcctagggacagcaacaggcgcaaaagaataacacccagtgcctgtctttgaggtgctgcagttcagtaggaaaaagaaatgcaaatgaccgcagagcaggctgaattcctccaagttccaatgtgggtgcagaggctctctgtgtgcagaaagaggggctgaactgcgaggtggccaccaacacagaggccctgcagagtggctggatagagatatggagctctacgtctctgtgcagaacctgagccgtcccagctcagcaagaaagcatcgctggagggcagcctggtggagatggaggtgtgttacaggaccctgccggcccagctgcaggggcttaacagaagcatggagcagcagctgtgcgagctctgctgcgacacggagcaccaggaccacaagcacaggtccttctggacgtgaagacgtggctggagcaggagatcgccacctaccgccgcttgctggaggttgaggacgcccagaggtgatactgacgatgcaggctggagtctggctgaggagccttgaatgccaagttaaagcgtctggactagatcacgtaggcaatggggagccatggagggatttggagcaggagagtgaaatgaacatcaagagattttagaacattcactctggctgcagagggagaaatggatcagaggggtcagggcggggccagagagatgtgtcagggggctggagcagggagtctggccagagaagtcccgtgcggtggtgggtagtggggcaggggaaggaaggtggtgcacgcagaagagaggttatagctcaaaacagcgggactggatgcctggatctcggggtaagcatggctcacagtcaggactcagtaagtgtcgggagaacacatgaaggagcaggcattgatggccctgggtttctggttctgatgactgtgtgagtggtgaagagcaaggtgggtggtggttgggtttgcagttgggaagggtgatcaggccttcagctgagagtgtcccggagtctccatgcttagtcacacgttgcagctttttgctccccggaaatggtgaagtccatctatagtctaacaacagtctctcctgctttaattgggtctatttgttgggccctctgggttatggaaaaaccacttgctcagcttctccttgtaaattcctggtgagtagccacagagtgccgccagacctactgctgtgctgtttctttttcttcttcctgctgtgctgaacccctgccctttcattcttgggcctgcgctaatttctgtgcattcccaactgtgatttttcaccaatttaggggaacctcctctgccagggcctacttctccccagcagtgcttgcaggtgcctgggctggctggcatccctgggctgatgggtgcttctctccctgcaggctggccactcagtactccttgtccctggcctcgcagcccacccgggaagccacagtgaccagccaccaggtgtgccatcgtggaggaagtccaggttggagaggtggtcttcttctgtgagcaggtccacttctccacccactgagacccctttctgtctgcgacagccccacctcgagggccacggcacagccatcagctccagctcccagcatgctactgccacgccccgagtgtccgtctgggccccggtgcatggcctgttgtctttctgtatctactttctgcagcccctcactgaggaggcctcctgggtttgtccagtgcctactattaaagctttgctccaagttc

SEQ ID NO: 242 - DNA, 2529 bp, Homo sapiens
gcatcctttttgggctgctcacagcccccagcctctatggtgaagacatacttgctagcagcgtcaccaacttgctgccaagagatcagtgctgcaaggcaaggttatttctaactgagcagagcctgccaggaagaaagcgtttgcaccccacaccactgtgcaggtgtgaccggtgagctcacagctgccccccaggcatgcccagcccacttaatcattcacagctcgacagctctctcgcccagcccagttctggaagggataaaaagggggcatcaccgttcctgggtaacagagccaccttctgcgtcctgctgagctctgttctctccagcacctcccaacccactagtgcctggttctcttgctccaccaggaacaagccaccatgtctcgccagtcaagtgtgtccttccggagcgggggcagtcgtagcttcagcaccgcctctgccatcaccccgtctgtctcccgcaccagcttcacctccgtgtcccggtccgggggtggcggtggtggtggcttcggcagggtcagccttgcgggtgcttgtggagtgggtggctatggcagccggagcctctacaacctggggggctccaagaggatatccatcagcactagaggaggcagcttcaggaaccggtttggtgctggtgctggaggcggctatggctttggaggtggtgccggtagtggatttggtttcggcggtggagctggtggtggctttgggctcggtggcggagctggctttggaggtggcttcggtggccctggctttcctgtctgccctcctggaggtatccaagaggtcactgtcaaccagagtctcctgactcccctcaacctgcaaatcgaccccagcatccagagggtgaggaccgaggagcgcgagcagatcaagaccctcaacaataagtttgcctccttcatcgacaaggtgcggttcctggagcagcagaacaaggttctggacaccaagtggaccctgctgcaggagcagggcaccaagactgtgaggcagaacctggagccgttgttcgagcagtacatcaacaacctcaggaggcagctggacagcatcgtgggggaacggggccgcctggactcagagctgagaaacatgcaggacctggtggaagacttcaagaacaagtatgaggatgaaatcaacaagcgtaccactgctgagaatgagtttgtgatgctgaagaaggatgtagatgctgcctacatgaacaaggtggagctggaggccaaggttgatgcactgatggatgagattaacttcatgaagatgttctttgatgcggagctgtcccagatgcagacgcatgtctctgacacctcagtggtcctctccatggacaacaaccgcaacctggacctggatagcatcatcgctgaggtcaaggcccagtatgaggagattgccaaccgcagccggacagaagccgagtcctggtatcagaccaagtatgaggagctgcagcagacagctggccggcatggcgatgacctccgcaacaccaagcatgagatcacagagatgaaccggatgatccagaggctgagagccgagattgacaatgtcaagaaacagtgcgccaatctgcagaacgccattgcggatgccgagcagcgtggggagctggccctcaaggatgccaggaacaagctggccgagctggaggaggccctgcagaaggccaagcaggacatggcccggctgctgcgtgagtaccaggagctcatgaacaccaagctggccctggacgtggagatcgccacttaccgcaagctgctggagggcgaggaatgcagactcagtggagaaggagttggaccagtcaacatctctgttgtcacaagcagtgtttcctctggatatggcagtggcagtggctatggcggtggcctcggtggaggtcttggcggcggcctcggtggaggtcttgccggaggtagcagtggaagctactactccagcagcagtgggggtgtcggcctaggtggtgggctcagtgtggggggctctggcttcagtgcaagcagtggccgagggctgggggtgggctttggcagtggcgggggtagcagctccagcgtcaaatttgtctccaccacctcctcctcccggaagagcttcaagagctaagaacctgctgcaagtcactgccttccaagtgcagcaacccagcccatggagattgcctcttctaggcagttgctcaagccatgttttatccttttctggagagtagtctagaccaagccaattgcagaaccacattctttggttcccaggagagccccattcccagcccctggtctcccgtgccgcagttctatattctgcttcaaatcagccttcaggtttcccacagcatggcccctgctgacacgagaacccaaagttttcccaaatctaaatcatcaaaacagaatccccaccccaatcccaaattttgttttggttctaactacctccagaatgtgttcaataaaatgcttttataatat

SEQ ID NO: 243 - DNA, 6816 bp, Homo sapiens
ggacggccgagcggcagggcgctcgcgcgcgcccactagtggccggaggagaaggctcccgcggaggccgcgctgcccgccccctcccctggggaggctcgcgttcccgctgctcgcgcctgcgccgcccgccggcctcaggaacgcgccctcttcgccggcgcgcgccctcgcagtcaccgccacccaccagctccggcaccaacagcagcgccgctgccaccgcccaccttctgccgccgccaccacagccaccttctcctcctccgctgtcctctcccgtcctcgcctctgtcgactatcaggtgaactttgaaccaggatggctgagccccgccaggagttcgaagtgatggaagatcacgctgggacgtacgggttgggggacaggaaagatcaggggggctacaccatgcaccaagaccaagagggtgacacggacgctggcctgaaagaatctcccctgcagacccccactgaggacggatctgaggaaccgggctctgaaacctctgatgctaagagcactccaacagcggaagatgtgacagcacccttagtggatgagggagctcccggcaagcaggctgccgcgcagccccacacggagatcccagaaggaaccacagctgaagaagcaggcattggagacacccccagcctggaagacgaagctgctggtcacgtgacccaagagcctgaaagtggtaaggtggtccaggaaggcttcctccgagagccaggccccccaggtctgagccaccagctcatgtccggcatgcctggggctcccctcctgcctgagggccccagagaggccacacgccaaccttcggggacaggacctgaggacacagagggcggccgccacgcccctgagctgctcaagcaccagcttctaggagacctgcaccaggaggggccgccgctgaagggggcagggggcaaagagaggccggggagcaaggaggaggtggatgaagaccgcgacgtcgatgagtcctccccccaagactcccctccctccaaggcctccccagcccaagatgggcggcctccccagacagccgccagagaagccaccagcatcccaggcttcccagcggagggtgccatccccctccctgtggatttcctctccaaagtttccacagagatcccagcctcagagcccgacgggcccagtgtagggcgggccaaagggcaggatgcccccctggagttcacgtttcacgtggaaatcacacccaacgtgcagaaggagcaggcgcactcggaggagcatttgggaagggctgcatttccaggggcccctggagaggggccagaggcccggggcccctctttgggagaggacacaaaagaggctgaccttccagagccctctgaaaagcagcctgctgctgctccgcgggggaagcccgtcagccgggtccctcaactcaaagctcgcatggtcagtaaaagcaaagacgggactggaagcgatgacaaaaaagccaagacatccacacgttcctctgctaaaaccttgaaaaataggccttgccttagccccaaacaccccactcctggtagctcagaccctctgatccaaccctccagccctgctgtgtgcccagagccaccttcctctcctaaatacgtctcttctgtcacttcccgaactggcagttctggagcaaaggagatgaaactcaagggggctgatggtaaaacgaagatcgccacaccgcggggagcagcccctccaggccagaagggccaggccaacgccaccaggattccagcaaaaaccccgcccgctccaaagacaccacccagctctgcgactaagcaagtccagagaagaccaccccctgcagggcccagatctgagagaggtgaacctccaaaatcaggggatcgcagcggctacagcagccccggctccccaggcactcccggcagccgctcccgcaccccgtcccttccaaccccacccacccgggagcccaagaaggtggcagtggtccgtactccacccaagtcgccgtcttccgccaagagccgcctgcagacagcccccgtgcccatgccagacctgaagaatgtcaagtccaagatcggctccactgagaacctgaagcaccagccgggaggcgggaaggtgcagataattaataagaagctggatcttagcaacgtccagtccaagtgtggctcaaaggataatatcaaacacgtcccgggaggcggcagtgtgcaaatagtctacaaaccagttgacctgagcaaggtgacctccaagtgtggctcattaggcaacatccatcataaaccaggaggtggccaggtggaagtaaaatctgagaagcttgacttcaaggacagagtccagtcgaagattgggtccctggacaatatcacccacgtccctggcggaggaaataaaaagattgaaacccacaagctgaccttccgcgagaacgccaaagccaagacagaccacggggcggagatcgtgtacaagtcgccagtggtgtctggggacacgtctccacggcatctcagcaatgtctcctccaccggcagcatcgacatggtagactcgccccagctcgccacgctagctgacgaggtgtctgcctccctggccaagcagggtttgtgatcaggcccctggggcggtcaataattgtggagaggagagaatgagagagtgtggaaaaaaaaagaataatgacccggcccccgccctctgcccccagctgctcctcgcagttcggttaattggttaatcacttaacctgcttttgtcactcggctttggctcgggacttcaaaatcagtgatgggagtaagagcaaatttcatctttccaaattgatgggtgggctagtaataaaatatttaaaaaaaaacattcaaaaacatggccacatccaacatttcctcaggcaattccttttgattcttttttcttccccctccatgtagaagagggagaaggagaggctctgaaagctgcttctgggggatttcaagggactgggggtgccaaccacctctggccctgttgtgggggtgtcacagaggcagtggcagcaacaaaggatttgaaacttggtgtgttcgtggagccacaggcagacgatgtcaaccttgtgtgagtgtgacgggggttggggtggggcgggaggccacgggggaggccgaggcaggggctgggcagaggggagaggaagcacaagaagtgggagtgggagaggaagccacgtgctggagagtagacatccccctccttgccgctgggagagccaaggcctatgccacctgcagcgtctgagcggccgcctgtccttggtggccgggggtgggggcctgctgtgggtcagtgtgccaccctctgcagggcagcctgtgggagaagggacagcgggtaaaaagagaaggcaagctggcaggagggtggcacttcgtggatgacctccttagaaaagactgaccttgatgtcttgagagcgctggcctcttcctccctccctgcagggtagggggcctgagttgaggggcttccctctgctccacagaaaccctgttttattgagttctgaaggttggaactgctgccatgattttggccactttgcagacctgggactttagggctaaccagttctctttgtaaggacttgtgcctcttgggagacgtccacccgtttccaagcctgggccactggcatctctggagtgtgtgggggtctgggaggcaggtcccgagccccctgtccttcccacggccactgcagtcaccccgtctgcgccgctgtgctgttgtctgccgtgagagcccaatcactgcctatacccctcatcacacgtcacaatgtcccgaattcccagcctcaccaccccttctcagtaatgaccctggttggttgcaggaggtacctactccatactgagggtgaaattaagggaaggcaaagtccaggcacaagagtgggaccccagcctctcactctcagttccactcatccaactgggaccctcaccacgaatctcatgatctgattcggttccctgtctcctcctcccgtcacagatgtgagccagggcactgctcagctgtgaccctaggtgtttctgccttgttgacatggagagagccctttcccctgagaaggcctggccccttcctgtgctgagcccacagcagcaggctgggtgtcttggttgtcagtggtggcaccaggatggaagggcaaggcacccagggcaggcccacagtcccgctgtcccccacttgcaccctagcttgtagctgccaacctcccagacagcccagcccgctgctcagctccacatgcatagtatcagccctccacacccgacaaaggggaacacacccccttggaaatggttcttttcccccagtcccagctggaagccatgctgtctgttctgctggagcagctgaacatatacatagatgttgccctgccctccccatctgcaccctgttgagttgtagttggatttgtctgtttatgcttggattcaccagagtgactatgatagtgaaaagaaaaaaaaaaaaaaaaaaggacgcatgtatcttgaaatgcttgtaaagaggtttctaacccaccctcacgaggtgtctctcacccccacactgggactcgtgtggcctgtgtggtgccaccctgctggggcctcccaagttttgaaaggctttcctcagcacctgggacccaacagagaccagcttctagcagctaaggaggccgttcagctgtgacgaaggcctgaagcacaggattaggactgaagcgatgatgtccccttccctacttccccttggggctccctgtgtcagggcacagactaggtcttgtggctggtctggcttgcggcgcgaggatggttctctctggtcatagcccgaagtctcatggcagtcccaaaggaggcttacaactcctgcatcacaagaaaaaggaagccactgccagctggggggatctgcagctcccagaagctccgtgagcctcagccacccctcagactgggttcctctccaagctcgccctctggaggggcagcgcagcctcccaccaagggccctgcgaccacagcagggattgggatgaattgcctgtcctggatctgctctagaggcccaagctgcctgcctgaggaaggatgacttgacaagtcaggagacactgttcccaaagccttgaccagagcacctcagcccgctgaccttgcacaaactccatctgctgccatgagaaaagggaagccgcctttgcaaaacattgctgcctaaagaaactcagcagcctcaggcccaattctgccacttctggtttgggtacagttaaaggcaaccctgagggacttggcagtagaaatccagggcctcccctggggctggcagcttcgtgtgcagctagagctttacctgaaaggaagtctctgggcccagaactctccaccaagagcctccctgccgttcgctgagtcccagcaattctcctaagttgaagggatctgagaaggagaaggaaatgtggggtagatttggtggtggttagagatatgcccccctcattactgccaacagtttcggctgcatttcttcacgcacctcggttcctcttcctgaagttcttgtgccctgctcttcagcaccatgggccttcttatacggaaggctctgggatctcccccttgtggggcaggctcttggggccagcctaagatcatggtttagggtgatcagtgctggcagataaattgaaaaggcacgctggcttgtgatcttaaatgaggacaatccccccagggctgggcactcctcccctcccctcacttctcccacctgcagagccagtgtccttgggtgggctagataggatatactgtatgccggctccttcaagctgctgactcactttatcaatagttccatttaaattgacttcagtggtgagactgtatcctgtttgctattgcttgttgtgctatggggggaggggggaggaatgtgtaagatagttaacatgggcaaagggagatcttggggtgcagcacttaaactgcctcgtaacccttttcatgatttcaaccacatttgctagagggagggagcagccacggagttagaggcccttggggtttctcttttccactgacaggctttcccaggcagctggctagttcattccctccccagccaggtgcaggcgtaggaatatggacatctggttgctttggcctgctgccctctttcaggggtcctaagcccacaatcatgcctccctaagaccttggcatccttccctctaagccgttggcacctctgtgccacctctcacactggctccagacacacagcctgtgcttttggagctgagatcactcgcttcaccctcctcatctttgttctccaagtaaagccacgaggtcggggcgagggcagaggtgatcacctgcgtgtcccatctacagacctgcagcttcataaaacttctgatttctcttcagctttgaaaagggttaccctgggcactggcctagagcctcacctcctaatagacttagccccatgagtttgccatgttgagcaggactatttctggcacttgcaagtcccatgatttcttcggtaattctgagggtggggggagggacatgaaatcatcttagcttagctttctgtctgtgaatgtctatatagtgtattgtgtgttttaacaaatgatttacactgactgttgctgtaaaagtgaatttggaaataaagttattactctgattaaa

SEQ ID NO: 244 - DNA, 2372 bp, Homo sapiens
gcaccgcgcgagcttggctgcttctggggcctgtgtggccctgtgtgtcggaaagatggagcaagaagccgagcccgaggggcggccgcgacccctctgaccgagatcctgctgctttcgcagccaggagcaccgtccctccccggattagtgcgtacgagcgcccagtgccctggcccggagagtggaatgatccccgaggcccagggcgtcgtgcttccgcagtagtcagtccccgtgaaggaaactggggagtcttgagggacccccgactccaagcgcgaaaaccccggatggtgaggagcaggcaaatgtgcaataccaacatgtctgtacctactgatggtgctgtaaccacctcacagattccagcttcggaacaagagaccctggttagaccaaagccattgcttttgaagttattaaagtctgttggtgcacaaaaagacacttatactatgaaagaggttcttttttatcttggccagtatattatgactaaacgattatatgatgagaagcaacaacatattgtatattgttcaaatgatcttctaggagatttgtttggcgtgccaagcttctctgtgaaagagcacaggaaaatatataccatgatctacaggaacttggtagtagtcaatcagcaggaatcatcggactcaggtacatctgtgagtgagaacaggtgtcaccttgaaggtgggagtgatcaaaaggaccttgtacaagagcttcaggaagagaaaccttcatcttcacatttggtttctagaccatctacctcatctagaaggagagcaattagtgagacagaagaaaattcagatgaattatctggtgaacgacaaagaaaacgccacaaatctgatagtatttccctttcctttgatgaaagcctggctctgtgtgtaataagggagatatgttgtgaaagaagcagtagcagtgaatctacagggacgccatcgaatccggatcttgatgctggtgtaagtgaacattcaggtgattggttggatcaggattcagtttcagatcagtttagtgtagaatttgaagttgaatctctcgactcagaagattatagccttagtgaagaaggacaagaactctcagatgaagatgatgaggtatatcaagttactgtgtatcaggcaggggagagtgatacagattcatttgaagaagatcctgaaatttccttagctgactattggaaatgcacttcatgcaatgaaatgaatcccccccttccatcacattgcaacagatgttgggcccttcgtgagaattggcttcctgaagataaagggaaagataaaggggaaatctctgagaaagccaaactggaaaactcaacacaagctgaagagggctttgatgttcctgattgtaaaaaaactatagtgaatgattccagagagtcatgtgttgaggaaaatgatgataaaattacacaagcttcacaatcacaagaaagtgaagactattctcagccatcaacttctagtagcattatttatagcagccaagaagatgtgaaagagtttgaaagggaagaaacccaagacaaagaagagagtgtggaatctagtttgccccttaatgccattgaaccttgtgtgatttgtcaaggtcgacctaaaaatggttgcattgtccatggcaaaacaggacatcttatggcctgctttacatgtgcaaagaagctaaagaaaaggaataagccctgcccagtatgtagacaaccaattcaaatgattgtgctaacttatttcccctagttgacctgtctataagagaattatatatttctaactatataaccctaggaatttagacaacctgaaatttattcacatatatcaaagtgagaaaatgcctcaattcacatagatttcttctctttagtataattgacctactttggtagtggaatagtgaatacttactataatttgacttgaatatgtagctcatcctttacaccaactcctaattttaaataatttctactctgtcttaaatgagaagtacttggttttttttttcttaaatatgtatatgacatttaaatgtaacttattattttttttgagaccgagtcttgctctgttacccaggctggagtgcagtgggtgatcttggctcactgcaagctctgccctccccgggttcgcaccattctcctgcctcagcctcccaattagcttggcctacagtcatctgccaccacacctggctaattttttgtacttttagtagagacagggtttcaccgtgttagccaggatggtctcgatctcctgacctcgtgatccgcccacctcggcctcccaaagtgctgggattacaggcatgagccaccg

SEQ ID NO: 245 - DNA, 2486 bp, Homo sapiens; identical to SEQ ID NO: 116

SEQ ID NO: 246 - DNA, 1140 bp, Homo sapiens
  misc_feature (1140)..(1140): n is a, c, g, t or u
gcagcggaggagcccagtccacgatggcccggtccctggtgtgccttggtgtcatcatcttgctgtctgccttctccggacctggtgtcaggggtggtcctatgcccaagctggctgaccggaagctgtgtgcggaccaggagtgcagccaccctatctccatggctgtggcccttcaggactacatggcccccgactgccgattcctgaccattcaccggggccaagtggtgtatgtcttctccaagctgaagggccgtgggcggctcttctggggaggcagcgttcagggagattactatggagatctggctgctcgcctgggctatttccccagtagcattgtccgagaggaccagaccctgaaacctggcaaagtcgatgtgaagacagacaaatgggatttctactgccagtgagctcagcctaccgctggccctgccgtttcccctccttgggtttatgcaaatacaatcagcccagtgcaaaaaaaaaaaaaaaaaaaaaaaacttcggagaagagatagcaacaaaaggccgcttgtgtgaaggcgccaaaagttttcgcccaagagaccttcggcctcccccagggcgcgcgcaaaggcgccttgttttgacaacctcttggacaaccggaggggctaccgcccggagacccctgtggtggaccccccgggcaacccggtgtgacagggtactcacccccacggctttgtcgggggtcccaccaaaggccccaaagaggctctttcaaggcactattccttgttgtagaccttgtgtgtgccacaggcgccaaagaaacctcggggggctaacaaacgcacgtgcttggcagctccgagaaggctctctcccacccgaggggtggacgcaacagggggaatgggccatcatattgttgcccccggtgggcaccaactctttttcccccatagagaggccttagcacactatgtggggcacgttattgccgcctagagaaaccgagcgccagaaaatttcgaaggggggggcgcttctcatcattttgcgcaaaacccccttgtgggagtatgccccgaactcctctggaacacacaagcgacacttgcgcggggtctgcaaaaaacctcctgttgggaagccggcttcacn

SEQ ID NO: 247 - DNA, 12507 bp, Homo sapiens; identical to SEQ ID NO: 198

SEQ ID NO: 248 - DNA, 3771 bp, Homo sapiens; identical to SEQ ID NO: 103

SEQ ID NO: 249 - DNA, 2240 bp, Homo sapiens
aagcccagcagccccggggcggatggctccggccgcctggctccgcagcgcggccgcgcgcgccctcctgcccccgatgctgctgctgctgctccagccgccgccgctgctggcccgggctctgccgccggacgcccaccacctccatgccgagaggagggggccacagccctggcatgcagccctgcccagtagcccggcacctgcccctgccacgcaggaagccccccggcctgccagcagcctcaggcctccccgctgtggcgtgcccgacccatctgatgggctgagtgcccgcaaccgacagaagaggttcgtgctttctggcgggcgctgggagaagacggacctcacctacaggatccttcggttcccatggcagttggtgcaggagcaggtgcggcagacgatggcagaggccctaaaggtatggagcgatgtgacgccactcacctttactgaggtgcacgagggccgtgctgacatcatgatcgacttcgccaggtactggcatggggacgacctgccgtttgatgggcctgggggcatcctggcccatgccttcttccccaagactcaccgagaaggggatgtccacttcgactatgatgagacctggactatcggggatgaccagggcacagacctgctgcaggtggcagcccatgaatttggccacgtgctggggctgcagcacacaacagcagccaaggccctgatgtccgccttctacacctttcgctacccactgagtctcagcccagatgactgcaggggcgttcaacacctatatggccagccctggcccactgtcacctccaggaccccagccctgggcccccaggctgggatagacaccaatgagattgcaccgctggagccagacgccccgccagatgcctgtgaggcctcctttgacgcggtctccaccatccgaggcgagctctttttcttcaaagcgggctttgtgtggcgcctccgtgggggccagctgcagcccggctacccagcattggcctctcgccactggcagggactgcccagccctgtggacgctgccttcgaggatgcccagggccacatttggttcttccaaggtgctcagtactgggtgtacgacggtgaaaagccagtcctgggccccgcacccctcaccgagctgggcctggtgaggttcccggtccatgctgccttggtctggggtcccgagaagaacaagatctacttcttccgaggcagggactactggcgtttccaccccagcacccggcgtgtagacagtcccgtgccccgcagggccactgactggagaggggtgccctctgagatcgacgctgccttccaggatgctgatggctatgcctacttcctgcgcggccgcctctactggaagtttgaccctgtgaaggtgaaggctctggaaggcttcccccgtctcgtgggtcctgacttctttggctgtgccgagcctgccaacactttcctctgaccatggcttggatgccctcaggggtgctgacccctgccaggccacgaatatcaggctagagacccatggccatctttgtggctgtgggcaccaggcatgggactgagcccatgtctcctcagggggatggggtggggtacaaccaccatgacaactgccgggagggccacgcaggtcgtggtcacctgccagcgactgtctcagactgggcagggaggctttggcatgacttaagaggaagggcagtcttgggcccgctatgcaggtcctggcaaacctggctgccctgtctccatccctgtccctcagggtagcaccatggcaggactgggggaactggagtgtccttgctgtatccctgttgtgaggttccttccaggggctggcactgaagcaagggtgctggggccccatggccttcagccctggctgagcaactgggctgtagggcagggccacttcctgaggtcaggtcttggtaggtgcctgcatctgtctgccttctggctgacaatcctggaaatctgttctccagaatccaggccaaaaagttcacagtcaaatggggaggggtattcttcatgcaggagaccccaggccctggaggctgcaacatacctcaatcctgtcccaggccggatcctcctgaagcccttttcgcagcactgctatcctccaaagccattgtaaatgtgtgtacagtgtgtataaaccttcttcttctttttttttttttaaactgaggattgtc

SEQ ID NO: 250 - DNA, 3167 bp, Homo sapiens
tagcagcacacaagggttcgtgtttgtggaaccaggtagcttccttcagagctgacatttgcccacagccagcctggcccagccccataccaccagccctggcgctctggggcgtgaggtgccttttctgcccccctgctctagggcaggtggaaatcacccatggtgggtctacatctgatagaagcatcttatagttctgcttctggaccagaccatcctgggtttttctctgttctgctgaagggttccctccacgtgtccatcacctcggtgaactcttgggagacctgggaagatgctggcctcacctctcgcctctcctttccctcattgtgctgccaccatccttctcacacaggctctccagggagagctgggcaggatgggatcttcctgggttcccaccttgctccgtgccccctctcactgttcctgaagtgtggccacggactgccttgttttctggaaagtcccaagtctggaccatgactgagcagcattctcggctatctgccacctgtctggggctcctggcccctcttagactcccctctcccttctgtttcccccgagcccctgacttggacctgcagggtggggagagggatgggacgagaacctgtgctggggccaaaggtcgcactgggggaaggtggagccagggcagcagagtgcctggcgtcggcccctatcctgtcactagttcccccgttctggcccctggcaggtttgtaaccccagatcagaagtactccatggacaacactccccacacgccaaccccgttcaagaacgccctggagaagtacggacccctgaagcccctggtacgtggtgtggtcactgccgtggatctctgcacagtgggatcccttcggttcatccaaccatgttcagtccacaggacccttccctctgaggtctcatttgattctttctcctgagaagatgcagagatcctgataatataaatggggaagctgaggctgctctttgtcacttcctccgactgctcctgagcacctgagtttgcaagcacgcgccggctggtgctagagacatggtggtatcccgtgacactcagcctcaggatgggggagactgatgtgaaatacaaataacttaaacactttcaggcaaagataagcactgggcctagttcagagaagtggcaaattgctactctggcctgtctctgaccaactcccagttctctacagagcacgggaaagcccctcggggacgtctttcctgcagtgtgcaggctgcccttctcccctgctcttcccagttgatgggatggttgtgttttctctatgaaaaaaggagttggcaccttgggctttctgaaacacacaggtgttttagaaatcagtggagggtgagagaaaggcatggttgtggaggcactggactgtgaacaaggtctgcagcgggtccccctgctgtctctctctactgcatggagcctcctatgaagcccaaggtggctgggggctgaggctcccttgggcctgccatggaactgattctgagtcaagcagactttccacggaccatgctacatgagccgaggtgaggcactagttagtgctcctttcctgttgcagtggagatttggctcctctgtactaaaatatctgcatgctctccaaacaggtgtgagggcaaatcacatgaccttggcagctgtaattaaagtttgtgggggcttttcggatgacttatgaggagtggctgtgattcgcacctttcactcttagtagcactcgccctcccctgttctctgttgcctgaagctggagaggtccttggaaccccgaggcctgagaaagggaaatgggtttgagagcccccattagtgtggaacaaagggttgagtgagcctgggctttgagctgtcggggtcctaattcagcagctgtgtgactgtgtgccaggctgttgatctctgagcttctgtttctacctgcttaaaatgacggttactgcacagggctgtgtgagggttacagtgcgtctctgggctgctcccagccatggcaggcccctgggaatcaaggtcatcagctgcttgtccaaggcagcagttagtggttgtgaatggtgcgtgtgagatctgcatcctggcgtcaggcctccttcctgccttacccaggacagcccagttgcagctgggttggtcccacagtcccacacacacacagcccgagtgtggtgcctcacgtgggctgccccgtgcctacccacagccacagaccccgcacctggaggaggacttgaaggaggtgctgcgttctgaggctggcatcgaactcatcatcgaggacgacatcaggcccgagaagcagaagaggaagcctgggctgcggcggagccccatcaagaaagtccggaagtctctggctcttgacattgtggatgaggatgtgaagctgatgatgtccacactgcccaagtctctatccttgccgacaactgccccttcaaactcttccagcctcaccctgtcaggtatcaaagaagacaacagcttgctcaaccagggcttcttgcaggccaagcccgagaaggcagcagtggcccagaagccccgaagccacttcacgacacctgcccctatgtccagtgcctggaagacggtggcctgcggggggaccagggaccagcttttcatgcaggagaaagcccggcagctcctgggccgcctgaagcccagccacacatctcggaccctcatcttgtcctgaggtgttgagggtgtcacgagcccattcacatgtttacaggggttgtgggggcagagggggtctgtgaatctgagagtcattcaggtgacctcctgcagggagccttctgccaccagcccctccccagactctcaggtggaggcaacagggccatgtgctgccctgttgccgagcccagctgtgggcggctcctggtgctaacaacaaagttccacttccaggtctgcctggttccccccccaaggccacagggagctccgtcagcttctcccaagcccacgtcaggcctggcctcatctcagaccctgcttaggatgggggatgtggccaggggtgctcctgtgctcaccctctcttggtgcatttttttggaagaataaaattgcctctctctttgaaaaaaaaaaaaaaaaa

SEQ ID NO: 251 - DNA, 2379 bp, Homo sapiens; identical to SEQ ID NO: 182

SEQ ID NO: 252 - DNA, 1799 bp, Homo sapiens
gtgggaggattgcattcagtctagttcctggttgccggctgaaataacctgctctccaaaatgtccacaaaagtgacttaagtcaggttcccccaaaccagacaccaagacaagaatccatgtgtgtgtgactgaaggaagtgctgggagagccccagctgcagcctggatgtgaactgcaactccaaagtgtgtccagactcaaggcaagggcactaggctttccagacctcctactaagtcattgatccagcactgccctgccaggacataaatccctggcacctcttgctctctgcaaaggagggcaaagcagcttcaggagcccttgggagtcctccaaagagagtctagggtacaggtccgaaagtagaagaacacagaaggcaggccaggggcactgtgagatggtaaaagagatctgaagggatccagaattcaagccaggaagaagcagcaatctgtcttctggattaaaactgaagatcaacctactttcaacttactaagaaaggggatcatggacattgaagcatatcttgaaagaattggctataagaagtctaggaacaaattggacttggaaacattaactgatattcttcaacaccagatccgagctgttccctttgagaaccttaacatccattgtggggatgccatggacttaggcttagaggccatttttgatcaagttgtgagaagaaatcggggtggatggtgtctccaggtcaatcatcttctgtactgggctctgaccactattggttttgagaccacgatgttgggagggtatgtttacagcactccagccaaaaaatacagcactggcatgattcaccttctcctgcaggtgaccattgatggcaggaactacattgtcgatgctgggtttggacgctcataccagatgtggcagcctctggagttaatttctgggaaggatcagcctcaggtgccttgtgtcttccgtttgacggaagagaatggattctggtatctagaccaaatcagaagggaacagtacattccaaatgaagaatttcttcattctgatctcctagaagacagcaaataccgaaaaatctactcctttactcttaagcctcgaacaattgaagattttgagtctatgaatacatacctgcagacatctccatcatctgtgtttactagtaaatcattttgttccttgcagaccccagatggggttcactgtttggtgggcttcaccctcacccataggagattcaattataaggacaatacagatctaatagagttcaagactctgagtgaggaagaaatagaaaaagtgctgaaaaatatatttaatatttccttgcagagaaagcttgtgcccaaacatggtgatagattttttactatttagaataaggagtaaaacaatcttgtctatttgtcatccagctcaccagttatcaactgacgacctatcatgtatcttctgtacccttaccttattttgaagaaaatcctagacatcaaatcatttcacctataaaaatgtcatcatatataattaaacagctttttaaagaaacataaccacaaaccttttcaaataataataataataataataataaatgtcttttaaagatggcctgtggttatcttggaaattggtgatttatgctagaaagcttttaatgttggtttattgttgaattcctagaaaagttttatgggtagatgagtaaataaaatattgtaaaaaaacttattgtctataaagtatattaaaacattgttggctaatataaaaaaaaaaaaaa

SEQ ID NO: 253 - DNA, 1644 bp, Homo sapiens; identical to SEQ ID NO: 162

SEQ ID NO: 254 - DNA, 13037 bp, Homo sapiens
agtccacagctgtcactaatcggggtaagccttgttgtatttgtgcgtgtgggtggcattctcaatgagaactagcttcacttgtcatttgagtgaaatctacaacccgaggcggctagtgctcccgcactactgggatctgagatcttcggagatgactgtcgcccgcagtacggagccagcagaagtccgacccttcctgggaatgggctgtaccgagaggtccgactagccccagggttttagtgagggggcagtggaactcagcgagggactgagagcttcacagcatgcacgagtttgatgccagagaaaaagtcgggagataaaggagccgcgtgtcactaaattgccgtcgcagccgcagccactcaagtgccggacttgtgagtactctgcgtctccagtcctcggacagaagttggagaactctcttggagaactccccgagttaggagacgagatctcctaacaattactactttttcttgcgctccccacttgccgctcgctgggacaaacgacagccacagttcccctgacgacaggatggaggccaagggcaggagctgaccagcgccgccctcccccgcccccgacccaggaggtggagatccctccggtccagccacattcaacacccactttctcctccctctgcccctatattcccgaaaccccctcctccttcccttttccctcctcctggagacgggggaggagaaaaggggagtccagtcgtcatgactgagctgaaggcaaagggtccccgggctccccacgtggcgggcggcccgccctcccccgaggtcggatccccactgctgtgtcgcccagccgcaggtccgttcccggggagccagacctcggacaccttgcctgaagtttcggccatacctatctccctggacgggctactcttccctcggccctgccagggacaggacccctccgacgaaaagacgcaggaccagcagtcgctgtcggacgtggagggcgcatattccagagctgaagctacaaggggtgctggaggcagcagttctagtcccccagaaaaggacagcggactgctggacagtgtcttggacactctgttggcgccctcaggtcccgggcagagccaacccagccctcccgcctgcgaggtcaccagctcttggtgcctgtttggccccgaacttcccgaagatccaccggctgcccccgccacccagcgggtgttgtccccgctcatgagccggtccgggtgcaaggttggagacagctccgggacggcagctgcccataaagtgctgccccggggcctgtcaccagcccggcagctgctgctcccggcctctgagagccctcactggtccggggccccagtgaagccgtctccgcaggccgctgcggtggaggttgaggaggaggatggctctgagtccgaggagtctgcgggtccgcttctgaagggcaaacctcgggctctgggtggcgcggcggctggaggaggagccgcggctgtcccgccgggggcggcagcaggaggcgtcgccctggtccccaaggaagattcccgcttctcagcgcccagggtcgccctggtggagcaggacgcgccgatggcgcccgggcgctccccgctggccaccacggtgatggatttcatccacgtgcctatcctgcctctcaatcacgccttattggcagcccgcactcggcagctgctggaagacgaaagttacgacggcggggccggggctgccagcgcctttgccccgccgcggagttcaccctgtgcctcgtccaccccggtcgctgtaggcgacttccccgactgcgcgtacccgcccgacgccgagcccaaggacgacgcgtaccctctctatagcgacttccagccgcccgctctaaagataaaggaggaggaggaaggcgcggaggcctccgcgcgctccccgcgttcctaccttgtggccggtgccaaccccgcagccttcccggatttcccgttggggccaccgcccccgctgccgccgcgagcgaccccatccagacccggggaagcggcggtgacggccgcacccgccagtgcctcagtctcgtctgcgtcctcctcggggtcgaccctggagtgcatcctgtacaaagcggagggcgcgccgccccagcagggcccgttcgcgccgccgccctgcaaggcgccgggcgcgagcggctgcctgctcccgcgggacggcctgccctccacctccgcctctgccgccgccgccggggcggcccccgcgctctaccctgcactcggcctcaacgggctcccgcagctcggctaccaggccgccgtgctcaaggagggcctgccgcaggtctacccgccctatctcaactacctgaggccggattcagaagccagccagagcccacaatacagcttcgagtcattacctcagaagatttgtttaatctgtggggatgaagcatcaggctgtcattatggtgtccttacctgtgggagctgtaaggtcttctttaagagggcaatggaagggcagcacaactacttatgtgctggaagaaatgactgcatcgttgataaaatccgcagaaaaaactgcccagcatgtcgccttagaaagtgctgtcaggctggcatggtccttggaggtcgaaaatttaaaaagttcaataaagtcagagttgtgagagcactggatgctgttgctctcccacagccagtgggcgttccaaatgaaagccaagccctaagccagagattcactttttcaccaggtcaagacatacagttgattccaccactgatcaacctgttaatgagcattgaaccagatgtgatctatgcaggacatgacaacacaaaacctgacacctccagttctttgctgacaagtcttaatcaactaggcgagaggcaacttctttcagtagtcaagtggtctaaatcattgccaggttttcgaaacttacatattgatgaccagataactctcattcagtattcttggatgagcttaatggtgtttggtctaggatggagatcctacaaacacgtcagtgggcagatgctgtattttgcacctgatctaatactaaatgaacagcggatgaaagaatcatcattctattcattatgccttaccatgtggcagatcccacaggagtttgtcaagcttcaagttagccaagaagagttcctctgtatgaaagtattgttacttcttaatacaattcctttggaagggctacgaagtcaaacccagtttgaggagatgaggtcaagctacattagagagctcatcaaggcaattggtttgaggcaaaaaggagttgtgtcgagctcacagcgtttctatcaacttacaaaacttcttgataacttgcatgatcttgtcaaacaacttcatctgtactgcttgaatacatttatccagtcccgggcactgagtgttgaatttccagaaatgatgtctgaagttattgctgcacaattacccaagatattggcagggatggtgaaaccccttctctttcataaaaagtgaatgtcatctttttcttttaaagaattaaattttgtggtatgtctttttgttttggtcaggattatgaggtcttgagtttttataatgttcttctgaaagccttacatttataacatcatagtgtgtaaatttaaaagaaaaattgtgaggttctaattattttcttttataaagtataattagaatgtttaactgttttgtttacccatattttcttgaagaatttacaagattgaaaaagtactaaaattgttaaagtaaactatcttatccatattatttcataccatgtaggtgaggatttttaacttttgcatctaacaaatcatcgacttaagagaaaaaatcttacatgtaataacacaaagctattatatgttatttctaggtaactccctttgtgtcaattatatttccaaaaatgaacctttaaaatggtatgcaaaattttgtctatatatatttgtgtgaggaggaaattcataactttcctcagattttcaaaagtatttttaatgcaaaaaatgtagaaagagtttaaaaccactaaaatagattgatgttcttcaaactaggcaaaacaactcatatgttaagaccattttccagattggaaacacaaatctcttaggaagttaataagtagattcatatcattatgcaaatagtattgtgggttttgtaggtttttaaaataaccttttttggggagagaattgtcctctaatgaggtattgcgagtggacataagaaatcagaagattatggcctaactgtactccttaccaactgtggcatgctgaaagttagtcactcttactgattctcaattctctcacctttgaaagtagtaaaatatctttcctgccaattgctcctttgggtcagagcttattaacatcttttcaaatcaaaggaaagaagaaagggagaggaggaggagggaggtatcaattcacatacctttctcctctttatcctccactatcatgaattcatattatgtttcagccatgcaaatctttttaccatgaaatttcttccagaattttccccctttgacacaaattccatgcatgtttcaaccttcgagactcagccaaatgtcatttctgtaaaatcttccctgagtcttccaagcagtaatttgccttctcctagagtttacctgccattttgtgcacatttgagttacagtagcatgttattttacaattgtgactctcctgggagtctgggagccatataaagtggtcaatagtgtttgctgactgagagttgaatgacattttctctctgtcttggtattactgtagatttcgatcattctttggttacatttctgcatatttctgtacccatgactttatcactttcttctcccatgctttatctccatcaattatcttcattacttttaaattttccacctttgcttcctactttgtgagatctctccctttactgactataacatagaagaatagaagtgtattttatgtgtcttaaggacaatactttagattccttgttctaagtttttaaactgaatgaatggaatattatttctctccctaagcaaaattccacaaaacaattatttcttatgtttatgtagccttaaattgttttgtactgtaaacctcagcataaaaactttcttcatttctaatttcattcaacaaatattgattgaatacctggtattagcacaagaaaaatgtgctaataagccttatgagaatttggagctgaagaaagacatataactcaggaaagttacagtccagtagtaggtataaattacagtgcctgataaataggcattttaatatttgtacactcaacgtatactaggtaggtgcaaaacatttacatataattttactgatacccatgcagcacaaaggtactaactttaaatattaaataacacctttatgtgtcagtaattcatttgcattaaatcttattgaaaaggctttcaatatattttccccacaaatgtcatcccaagaaaaaagtatttttaacatctcccaaatataatagttacaggaaatctacctctgtgagagtgacacctctcagaatgaactgtgtgacacaagaaaatgaatgtaggtctatccaaaaaaaaccccaagaaacaaaaacaatattattagccctttatgcttaagtgatggactcagggaacagttgatgttgtgatcattttattatctgattcttgttactttgaattaaaccaatattttgatgatataaatcatttccaccagcatatatttaatttccataataactttaaaattttctaatttcactcaactatgagggaatagaatgtggtggccacaggtttggcttttgttaaaatgtttgatatcttcgatgttgatctctgtctgcaatgtagatgtctaaacactaggatttaatatttaaggctaagctttaaaaataaagtacctttttaaaaagaatatggcttcaccaaatggaaaatacctaatttctaaatctttttctctacaaagtcctatctactaatgtctccattactatttagtcatcataaccattatcttcattttacatgtcgtgttctttctggtagctctaaaatgacactaaatcataagaagacaggttacatatcaggaaatacttgaaggttactgaaatagattcttgagttaatgaaaatattttctgtaaaaaggtttgaaaagccatttgagtctaaagcattatacctccattatcagtagttatgtgacaattgtgtgtgtgtttaatgtttaaagatgtggcactttttaataaggcaatgctatgctattttttcccatttaacattaagataatttattgctatacagatgatatggaaatatgatgaacaatattttttttgccaaaactatgccttgtaagtagccatggaatgtcaacctgtaacttaaattatccacagatagtcatgtgtttgatgatgggcactgtggagataactgacataggactgtgccccccttctctgccacttactagctggatgagattaagcaagtcatttaactgctctgattaaacctgcctttcccaagtgctttgtaatgaatagaaatggaaaccaaaaaaaacgtatacaggccttcagaaatagtaattgctactattttgttttcattaagccatagttctggctataattttatcaaactcaccagctatattctacagtgaaagcaggattctagaaagtctcactgttttatttatgtcaccatgtgctatgatatatttggttgaattcatttgaaattagggctggaagtattcaagtaatttcttctgctgaaaaaatacagtgttttgagtttagggcctgttttatcaaagttctaaagagcctatcactcttccattgtagacattttaaaataatgacactgattttaacatttttaagtgtctttttagaacagagagcctgactagaacacagcccctccaaaaacccatgctcaaattatttttactatggcagcaattccacaaaagggaacaatgggtttagaaattacaatgaagtcatcaacccaaaaaacatccctatccctaagaaggttatgatataaaatgcccacaagaaatctatgtctgctttaatctgtcttttattgctttggaaggatggctattacatttttagtttttgctgtgaatacctgagcagtttctctcatccatacttatccttcacacatcagaagtcaggatagaatatgaatcattttaaaaacttttacaactccagagccatgtgcataagaagcattcaaaacttgccaaaacatacattttttttcaaatttaaagatactctatttttgtattcaatagctcaacaactgtggtccccactgataaagtgaagtggacaaggagacaagtaatggcataagtttgtttttcccaaagtatgcctgttcaatagccattggatgtgggaaatttctacatctcttaaaattttacagaaaatacatagccagatagtctagcaaaagttcaccaagtcctaaattgcttatccttacttcactaagtcatgaaatcattttaatgaaaagaacatcacctaggttttgtggtttctttttttcttattcatggctgagtgaaaacaacaatctctgtttctccctagcatctgtggactatttaatgtaccattattccacactctatggtccttactaaatacaaaattgaacaaaaagcagtaaaacaactgactcttcacccatattataaaatataatccaagccagattagtcaacatccataagatgaatccaagctgaactgggcctagattattgagttcaggttggatcacatccctatttattaataaacttaggaaagaaggccttacagaccatcagttagctggagctaatagaacctacacttctaaagttcggcctagaatcaatgtggccttaaaagctgaaaagaagcaggaaagaacagttttcttcaataatttgtccaccctgtcactggagaaaatttaagaatttgggggtgttggtagtaagttaaacacagcagctgttcatggcagaaattattcaatacataccttctctgaatatcctataaccaaagcaaagaaaaacaccaaggggtttgttctcctccttggagttgacctcattccaaggcagagctcaggtcacaggcacaggggctgcgcccaagcttgtccgcagccttatgcagctgtggagtctggaagactgttgcaggactgctggcctagtcccagaatgtcagcctcattttcgatttactggctcttgttgctgtatgtcatgctgaccttattgttaaacacaggtttgtttgctttttttccactcatggagacatgggagaggcattatttttaagctggttgaaagctttaaccgataaagcatttttagagaaatgtgaatcaggcagctaagaaagcatactctgtccattacggtaaagaaaatgcacagattattaactctgcagtgtggcattagtgtcctggtcaatattcggatagatatgaataaaatatttaaatggtattgtaaatagttttcaggacatatgctatagcttatttttattatcttttgaaattgctcttaatacatcaaatcctgatgtattcaatttatcagatataaattattctaaatgaagcccagttaaatgtttttgtcttgtcagttatatgttaagtttctgatctctttgtctatgacgtttactaatctgcatttttactgttatgaattattttagacagcagtggtttcaagctttttgccactaaaaataccttttattttctcctcccccagaaaagtctataccttgaagtatctatccaccaaactgtacttctattaagaaatagttattgtgttttcttaatgttttgttattcaaagacatatcaatgaaagctgctgagcagcatgaataacaattatatccacacagatttgatatattttgtgcagccttaacttgatagtataaaatgtcattgctttttaaataatagttagtcaatggacttctatcatagctttcctaaactaggttaagatccagagctttggggtcataatatattacatacaattaagttatctttttctaagggctttaaaattcatgagaataaccaaaaaaggtatgtggagagttaatacaaacataccatattcttgttgaaacagagatgtggctctgcttgttctccataaggtagaaatactttccagaatttgcctaaactagtaagccctgaatttgctatgattagggataggaagagattttcacatggcagactttagaattcttcactttagccagtaaagtatctccttttgatcttagtattctgtgtattttaacttttctgagttgtgcatgtttataagaaaaatcagcacaaagggtttaagttaaagcctttttactgaaatttgaaagaaacagaagaaaatatcaaagttctttgtattttgagaggattaaatatgatttacaaaagttacatggagggctctctaaaacattaaattaattattttttgttgaaaagtcttactttaggcatcattttattcctcagcaactagctgtgaagcctttactgtgctgtatgccagtcactctgctagattgtggagattaccagtgttcccgtcttctccgagcttagagttggatggggaataaagacaggtaaacagatagctacaatattgtactgtgaatgcttatgctggaggaagtacagggaactattggagcacctaagaggagcacctaccttgaatttaggggttagcagaggcatcctgaaaaaagtcaaagctaagccacaatctataagcagtttaggaattagcagaacgtgcgtggtgaggagatgccaaaggcaagaagagaagagtattccaaacaggagggattccaaagagagaagagtatcccaaacaacatttgcacaaacctgatggggagagagaatgtggggtggggatggatgatgagactgaagaagaaagccaggtctagataatcagtggccttgtacaccatgttaaagagtgtagacttgattctgttgtaaacaggaaagcagcacaattcatatgaatattttagaagactcccactggaatatggagaataaagttggagatgactaatcctggaagcagggagaacatttttgaggaagttgcactattttggtgaaaatgatgatcataaacatgaagaattgtaggtgatcatgacctcctctctaattttccagaagggttttggaagatataacataggaacattgacaggactgacgaaaggagatgaaatacaccatataaattgtcaaacacaaggccagatgtctaattattttgcttatgtgttgaaattacaaatttttcatcaggaaaccaaaaactacaaaacttagttttcccaagtcccagaattctatctgtccaaacaatctgtaccactccacctatatccctacctttgcatgtctgtccaacctcaaagtccaggtctatacacacgggtaagactagagcagttcaagtttcagaaaatgagaaagaggaactgagttgtgctgaacccatacaaaataaacacattctttgtatagattcttggaacctcgagaggaattcacctaactcataggtatttgatggtatgaatccatggctgggctcggcttttaaaaagccttatctgggattccttctatggaaccaagttccatcaaagcccatttaaaagcctacattaaaaacaaaattcttgctgcattgtatacaaataatgatgtcatgatcaaataatcagatgccattatcaagtggaattacaaaatggtatacccactccaaaaaaaaaaaaaaagctaaattctcagtagaacattgtgacttcatgagccctccacagccttggagctgaggagggagcactggtgagcagtaggttgaagagaaaacttggcgcttaataatctatccatgttttttcatctaaaagagccttctttttggattaccttattcaatttccatcaaggaaattgttagttccactaaccagacagcagctgggaaggcagaagcttactgtatgtacatggtagctgtgggaaggaggtttctttctccaggtcctcactggccatacaccagtcccttgttagttatgcctggtcatagacccccgttgctatcatctcatatttaagtctttggcttgtgaatttatctattctttcagcttcagcactgcagagtgctgggactttgctaacttccatttcttgctggcttagcacattcctcataggcccagctcttttctcatctggccctgctgtggagtcaccttgccccttcaggagagccatggcttaccactgcctgctaagcctccactcagctgccaccacactaaatccaagcttctctaagatgttgcagactttacaggcaagcataaaaggcttgatcttcctggacttccctttacttgtctgaatctcacctccttcaactttcagtctcagaatgtaggcatttgtcctctttgccctacatcttccttcttctgaatcatgaaagcctctcacttcctcttgctatgtgctggaggcttctgtcaggttttagaatgagttctcatctagtcctagtagcttttgatgcttaagtccaccttttaaggatacctttgagatttagaccatgtttttcgcttgagaaagccctaatctccagacttgcctttctgtggatttcaaagaccaactgaggaagtcaaaagctgaatgttgactttctttgaacatttccgctataacaattccaattctcctcagagcaatatgcctgcctccaactgaccaggagaaaggtccagtgccaaagagaaaaacacaaagattaattatttcagttgagcacatactttcaaagtggtttgggtattcatatgaggttttctgtcaagagggtgagactcttcatctatccatgtgtgcctgacagttctcctggcactggctggtaacagatgcaaaactgtaaaaattaagtgatcatgtattttaacgatatcatcacatacttattttctatgtaatgttttaaatttcccctaacatactttgactgttttgcacatggtagatattcacatttttttgtgttgaagttgatgcaatcttcaaagttatctaccccgttgcttattagtaaaactagtgttaatacttggcaagagatgcagggaatctttctcatgactcacgccctatttagttattaatgctactaccctattttgagtaagtagtaggtccctaagtacattgtccagagttatacttttaaagatatttagccccatatacttcttgaatctaaagtcatacaccttgctcctcatttctgagtgggaaagacatttgagagtatgttgacaattgttctgaaggtttttgccaagaaggtgaaactgtcctttcatctgtgtatgcctggggctgggtccctggcagtgatggggtgacaatgcaaagctgtaaaaactaggtgctagtgggcacctaatatcatcatcatatacttattttcaagctaatatgcaaaatcccatctctgtttttaaactaagtgtagatttcagagaaaatattttgtggttcacataagaaaacagtctactcagcttgacaagtgttttatgttaaattggctggtggtttgaaatgaatcatcttcacataatgttttctttaaaaatattgtgaatttaactctaattcttgttattctgtgtgataataaagaataaactaatttcta

SEQ ID NO: 255 - DNA, 3180 bp, Homo sapiens
attctatgctgcagcctaagcatcattcctcttctcttcttagtggagataaaattacccactgctctccttacatttactttgtccatatttgctcctatgctctaggctcgtgcacaacaaacacagtgtgggcccttaccctagaagccaacttctcatgacctttctctatctccagaatccatgcagtgggaatgaaggtaaaagaaggttttcatgggatccagctgagagctctacggggaaaatggatctgaggagccatgtgctccatctcttttattttacaggtagagactaggggtatagagtgaggtgaattaccgcagtgacccacacattgttggcagacctaggattagaactctgtcttcctggttcccagcttggtgcttttgaaagcatacttgctgctttcttaccggcctggtgtctgccactttgggacagagtgtggacttgctcacctgccccatttcttagggattctcattctgtgtttgagcaagaatattcttattctggaaagaaccacataccacaggattctgggtgagcataaggaagattgtcttggggatctgacttagctcacgtatagtggctatgatgaattcagtgtcttattttttgcatatgtatatttttagtctaatattgcctgggtgtctgagcaagtctagatgaatttaattgctctcatttttcccctgcccctcttcctttggtctctcttttaggaaatgtttttctttcaacattcgtttcattcattatttactcattcggccaaccaacatttattgagtgccttccctgtatcagggacaggggcttacaaagtagaatttgatcccacctctgccctcagtagctcagtgtctaatggaggtagtgatgttcattaagcgtcgccagatactgtgctaggtgctgtgcctgttctctctcgcttgttcctcacacacttgagaaggccgaagctgattcatagcttggaaggcaggggccttggatttgaacccaggcctgaccaatggcagaacctatcagatgtgtggacagatgacattgcctttctttctttggatatatcaaaatcagccagcaggcaggaactcccattttgagcaagcaatgtgcaggaatgatagggtatacagagaggaacaggagatggcccctgacttccagcatgtgtctgatggacatccaggctgcaggcatcatggtgctgtctagagagatgagccaggtgcccagagcccatgggccaatgctgccctttcttgagcatgccaaacaaagcggttggtgtgttagaggcacagtctcctccactctaagtaaaaatcagcatgagtcctagcccacatttccctagtgagtacaccaaagatatctatgaactggcagtcatcagtgacttcctaaggttccggaaatgcatctcttactcaggagtaagcaatgatgtgcctgcggctttacgagttctcacagaatgactttctggacccaaatgttttttctgcttcaggactgtgaaggccttattgttcgctctgccaccaaggtgaccgctgatgtcatcaacgcagctgagaaactccaggtggtgggcagggctggcacaggtgtggacaatgtggatctggaggccgcaacaaggaagggcatcttggttatgaacacccccaatgggaacagcctcagtgccgcagaactcacttgtggaatgatcatgtgcctggccaggcagattccccaggcgacggcttcgatgaaggacggcaaatgggagcggaagaagttcatgggaacagagctgaatggaaagaccctgggaattcttggcctgggcaggattgggagagaggtagctacccggatgcagtcctttgggatgaagactatagggtatgaccccatcatttccccagaggtctcggcctcctttggtgttcagcagctgcccctggaggagatctggcctctctgtgatttcatcactgtgcacactcctctcctgccctccacgacaggcttgctgaatgacaacacctttgcccagtgcaagaagggggtgcgtgtggtgaactgtgcccgtggagggatcgtggacgaaggcgccctgctccgggccctgcagtctggccagtgtgccggggctgcactggacgtgtttacggaagagccgccacgggaccgggccttggtggaccatgagaatgtcatcagctgtccccacctgggtgccagcaccaaggaggctcagagccgctgtggggaggaaattgctgttcagttcgtggacatggtgaaggggaaatctctcacgggggttgtgaatgcccaggcccttaccagtgccttctctccacacaccaagccttggattggtctggcagaagctctggggacactgatgcgagcctgggctgggtcccccaaagggaccatccaggtgataacacagggaacatccctgaagaatgctgggaactgcctaagccccgcagtcattgtcggcctcctgaaagaggcttccaagcaggcggatgtgaacttggtgaacgctaagctgctggtgaaagaggctggcctcaatgtcaccacctcccacagccctgctgcaccaggggggcaaggcttcggggaatgcctcctggccgtggccctggcaggcgccccttaccaggctgtgggcttggtccaaggcactacacctgtactgcaggggctcaatggagctgtcttcaggccagaagtgcctctccgcagggacctgcccctgctcctattccggactcagacctctgaccctgcaatgctgcctaccatgattggcctcctggcagaggcaggcgtgcggctgctgtcctaccagacttcactggtgtcagatggggagacctggcacgtcatgggcatctcctccttgctgcccagcctggaagcgtggaagcagcatgtgactgaagccttccagttccacttctaaccttggagctcactggtccctgcctctggggcttttctgaagaaacccacccactgtgatcaatagggagagaaaatccacattcttgggctgaacgcgagcctctgacactgcttacactgcactctgaccctgtagtacagcaataaccgtctaataaagagcctaccccc

SEQ ID NO: 256 - DNA, 1301 bp, Homo sapiens
  misc_feature (1301)..(1301): n is a, c, g, t or u
caaacaaaaacagccaagcttttctgccaaaaagatgactgagaagactgttaaagcaaaaagctctgttcctgcctcagatgatgcctatccagaaatagaaaaattctttcccttcaatcctctagactttgagagttttgacctgcctgaagagcaccagattgcgcacctccccttgagtggagtgcctctcatgatccttgacgaggagagagagcttgaaaagctgtttcagctgggccccccttcacctgtgaagatgccctctccaccatgggaatccaatctgttgcagtctccttcaagcattctgtcgaccctggatgttgaattgccacctgtttgctgtgacatagatatttaaatttcttagtgcttcagagtctgtgtgtatttgtattaataaagcattctttaacagaaaaaaaaaaaaaaaaaaaaaaaaaaaaaaaaaaaaaaaaaaaaaaaggggggggagacacaaaaagaattccccaagagggggccacaagataatcagaggatatcacacaagatctctcggcgcaccaacgacgggggccccaaataagggagagacccagaatcacaacagccaagacacggtggacacgacggaaacaaacacacagcccagacacgggggcaaacacgcgcgcacaccgcggacaccatgggacaaagcagacaccacccacaaaacaacaccgcggagggggaagaacaacaaaacaagtgcgcaaacagaacacaaccacagaaagagaaaaattaaaacggcccccaagacggcgacaacacaacaaaacaaccactacagagcgctcaacagccgagtaaaaacacaacaacggacaactaacacacaaaggaatgaaacaaagcggggccacacaccgacaccggaaatccggcgaacaactcacaccgagcgagggtcccagacaacaaatacacagacaacgaaaccgagaaacaagaccagcaagacgagcaggcaaaagacaaacaagacagaggagacgacgacgaacgcaaaggacaagaggacacaacgacgcgaggagcgagagcgagaggaagagacaacaaaaagacacaaaagaacaacaagcaagcagcgaagaacgacacacaaccacacgagacagcaggagcagaggcggagaaaacacaacgagcaagccaagaccaagagaggagaacaaaataaaaaaatacgagagcaggcggacgagagcacgagacgaacagacaaacgggaatcagaagcataacgatccgcgacgcgaacaacn

SEQ ID NO: 257 - DNA, 3203 bp, Homo sapiens
gtgcaccctgtcccagccgtcctgtcctggctgctcgctctgcttcgctgcgcctccactatgctctccctccgtgtcccgctcgcgcccatcacggacccgcagcagctgcagctctcgccgctgaaggggctcagcttggtcgacaaggagaacacgccgccggccctgagcgggacccgcgtcctggccagcaagaccgcgaggaggatcttccaggagaaaacccccgccgctttgtcatcttccccatcgagtaccatgatatctggcagatgtataagaaggcagaggcttccttttggaccgccgaggaggtggacctctccaaggacattcagcactgggaatccctgaaacccgaggagagatattttatatcccatgttctggctttctttgcagcaagcgatggcatagtaaatgaaaacttggtggagcgatttagccaagaagttcagattacagaagcccgctgtttctatggcttccaaattgccatggaaaacatacattctgaaatgtatagtcttcttattgacacttacataaaagatcccaaagaaagggaatttctcttcaatgccattgaaacgatgccttgtgtcaagaagaaggcagactgggccttgcgctggattggggacaaagaggctacctatggtgaacgtgttgtagcctttgctgcagtggaaggcattttcttttccggttcttttgcgtcgatattctggctcaagaaacgaggactgatgcctggcctcacattttctaatgaacttattagcagagatgagggtttacactgtgattttgcttgcctgatgttcaaacacctggtacacaaaccatcggaggagagagtaagagaaataattatcaatgctgttcggatagaacaggagttcctcactgaggccttgcctgtgaagctcattgggatgaattgcactctaatgaagcaatacattgagtttgtggcagacagacttatgctggaactgggttttagcaaggttttcagagtagagaacccatttgactttatggagaatatttcactggaaggaaagactaacttctttgagaagagagtaggcgagtatcagaggatgggagtgatgtcaagtccaacagagaattcttttaccttggatgctgacttctaaatgaactgaagatgtgcccttacttggctgatttttttttttccatctcataagaaaaatcagctgaagtgttaccaactagccacaccatgaattgtccgtaatgttcattaacagcatctttaaaactgtgtagctacctcacaaccagtcctgtctgtttatagtgctggtagtatcaccttttgccagaaggcctggctggctgtgacttaccatagcagtgacaatggcagtcttggctttaaagtgaggggtgaccctttagtgagcttagcacagcgggattaaacagtcctttaaccagcacagccagttaaaagatgcagcctcactgcttcaacgcagattttaatgtttacttaaatataaacctggcactttacaaacaaataaacattgtttgtactcacaaggcgataatagcttgatttatttggtttctacaccaaatacattctcctgaccactaatgggagccaattcacaattcactaagtgactaaagtaagttaaacttgtgtagactaagcatgtaatttttaagttttattttaatgaattaaaatatttgttaaccaactttaaagtcagtcctgtgtatacctagatattagtcagttggtgccagatagaagacaggttgtgtttttatcctgtggcttgtgtagtgtcctgggattctctgccccctctgagtagagtgttgtgggataaaggaatctctcagggcaaggagcttcttaagttaaatcactagaaatttaggggtgatctgggccttcatatgtgtgagaagccgtttcattttatttctcactgtattttcctcaacgtctggttgatgagaaaaaattcttgaagagttttcatatgtgggagctaaggtagtattgtaaaatttcaagtcatccttaaacaaaatgatccacctaagatcttgcccctgttaagtggtgaaatcaactagaggtggttcctacaagttgttcattctagttttgtttggtgtaagtaggttgtgtgagttaattcatttatatttactatgtctgttaaatcagaaattttttattatctatgttcttctagattttacctgtagttcatacttcagtcacccagtgtcttattctggcattgtctaaatctgagcattgtctagggggatcttaaactttagtaggaaaccatgagctgttaatacagtttccattcaaatattaatttcagaatgaaacataattttttttttttttttttgagatggagtctcgctctgttgcccaggctggagtgcagtggcgcgattttggctcactgtaacctccatctcctgggttcaagcaattctcctgtctcagcctccctagtagctgggactgcaggtatgtgctaccacacctggctaatttttgtatttttagtagagatggagtttcaccatattggtcaggctggtcttgaactcctgacctcaggtgatccacccacctcggcctcccaaagtgctgggattgcaggcgtgataaacaaatattcttaatagggctactttgaattaatctgcctttatgtttgggagaagaaagctgagacattgcatgaaagatgatgagagataaatgttgatcttttggccccatttgttaattgtattcagtatttgaacgtcgtcctgtttattgttagttttcttcatcatttattgtatagacaatttttaaatctctgtaatatgatacattttcctatcttttaagttattgttacctaaagttaatccagattatatggtccttatatgtgtacaacattaaaatgaaaggctttgtcttgcattgtgaggtacaggcggaagttggaatcaggttttaggattctgtctctcattagctgaataatgtgaggattaacttctgccagctcagaccatttcctaatcagttgaaagggaaacaagtatttcagtctcaaaattgaataatgcacaagtcttaagtgattaaaataaaactgttcttatgtcagttt

SEQ ID NO: 258 - DNA, 4482 bp, Homo sapiens
agcgggggcactccagccctgcagcctccggagtcagtgccgcgcgcccgccgccccgcgccttcctgctcgccgcacctccgggagccggggcgcacccagcccgcagcgccgcctccccgcccgcgccgcctccgaccgcaggccgagggccgccactggccggggggaccgggcagcagcttgcggccgcggagccgggcaacgctggggactgcgccttttgtccccggaggtccctggaagtttgcggcaggacgcgcgcggggaggcggcggaggcagccccgacgtcgcggagaacagggcgcagagccggcatgggcatcgggcgcagcgaggggggccgccgcggggcagccctgggcgtgctgctggcgctgggcgcggcgcttctggccgtgggctcggccagcgagtacgactacgtgagcttccagtcggacatcggcccgtaccagagcgggcgcttctacaccaagccacctcagtgcgtggacatccccgcggacctgcggctgtgccacaacgtgggctacaagaagatggtgctgcccaacctgctggagcacgagaccatggcggaggtgaagcagcaggccagcagctgggtgcccctgctcaacaagaactgccacgccggcacccaggtcttcctctgctcgctcttcgcgcccgtctgcctggaccggcccatctacccgtgtcgctggctctgcgaggccgtgcgcgactcgtgcgagccggtcatgcagttcttcggcttctactggcccgagatgcttaagtgtgacaagttccccgagggggacgtctgcatcgccatgacgccgcccaatgccaccgaagcctccaagccccaaggcacaacggtgtgtcctccctgtgacaacgagttgaaatctgaggccatcattgaacatctctgtgccagcgagtttgcactgaggatgaaaataaaagaagtgaaaaaagaaaatggcgacaagaagattgtccccaagaagaagaagcccctgaagttggggcccatcaagaagaaggacctgaagaagcttgtgctgtacctgaagaatggggctgactgtccctgccaccagctggacaacctcagccaccacttcctcatcatgggccgcaaggtgaagagccagtacttgctgacggccatccacaagtgggacaagaaaaacaaggagttcaaaaacttcatgaagaaaatgaaaaaccatgagtgccccacctttcagtccgtgtttaagtgattctcccgggggcagggtggggagggagcctcgggtggggtgggagcgggggggacagtgccccgggaacccggtgggtcacacacacgcactgcgcctgtcagtagtggacatttaatccagtcggcttgttcttgcagcattcccgctcccttccctccatagccacgctccaaaccccagggtagccatggccgggtaaagcaagggccatttagattaggaaggtttttaagatccgcaatgtggagcagcagccactgcacaggaggaggtgacaaaccatttccaacagcaacacagccactaaaacacaaaaagggggattgggcggaaagtgagagccagcagcaaaaactacattttgcaacttgttggtgtggatctattggctgatctatgcctttcaactagaaaattctaatgattggcaagtcacgttgttttcaggtccagagtagtttctttctgtctgctttaaatggaaacagactcataccacacttacaattaaggtcaagcccagaaagtgataagtgcagggaggaaaagtgcaagtccattatgtaatagtgacagcaaagggaccaggggagaggcattgccttctctgcccacagtctttccgtgtgattgtctttgaatctgaatcagccagtctcagatgccccaaagtttcggttcctatgagcccggggcatgatctgatccccaagacatgtggaggggcagcctgtgcctgcctttgtgtcagaaaaaggaaaccacagtgagcctgagagagacggcgattttcgggctgagaaggcagtagttttcaaaacacatagttaaaaaagaaacaaatgaaaaaaattttagaacagtccagcaaattgctagtcagggtgaattgtgaaattgggtgaagagcttacgattctaatctcatgttttttccttttcacatttttaaaagaacaatgacaaacacccacttatttttcaaggttttaaaacagtctacattgagcatttgaaaggtgtgctagaacaaggtctcctgatccgtccgaggctgcttcccagaggagcagctctccccaggcatttgccaagggaggcggatttccctggtagtgtagctgtgtggctttccttcctgaagagtccgtggttgccctagaacctaacaccccctagcaaaactcacagagctttccgtttttttctttcctgtaaagaaacatttcctttgaacttgattgcctatggatcaaagaaattcagaacagcctgcctgtccccccgcactttttacatatatttgtttcatttctgcagatggaaagttgacatgggtggggtgtccccatccagcgagagagtttaaaaagcaaaacatctctgcagtttttcccaagtgccctgagatacttcccaaagcccttatgtttaatcagcgatgtatataagccagttcacttagacaactttacccttcttgtccaatgtacaggaagtagttctaaaaaaaatgcatattaatttcttcccccaaagccggattcttaattctctgcaacactttgaggacatttatgattgtccctctgggccaatgcttatacccagtgaggatgctgcagtgaggctgtaaagtggccccctgcggccctagcctgacccggaggaaaggatggtagattctgttaactcttgaagactccagtatgaaaatcagcatgcccgcctagttacctaccggagagttatcctgataaattaacctctcacagttagtgatcctgtccttttaacaccttttttgtggggttctctctgacctttcatcgtaaagtgctggggaccttaagtgatttgcctgtaattttggatgattaaaaaatgtgtatatatattagctaattagaaatattctacttctctgttgtcaaactgaaattcagagcaagttcctgagtgcgtggatctgggtcttagttctggttgattcactcaagagttcagtgctcatacgtatctgctcattttgacaaagtgcctcatgcaaccgggccctctctctgcggcagagtccttagtggaggggtttacctggaacattagtagttaccacagaatacggaagagcaggtgactgtgctgtgcagctctctaaatgggaattctcaggtaggaagcaacagcttcagaaagagctcaaaataaattggaaatgtgaatcgcagctgtgggttttaccaccgtctgtctcagagtcccaggaccttgagtgtcattagttactttattgaaggttttagacccatagcagctttgtctctgtcacatcagcaatttcagaaccaaaagggaggctctctgtaggcacagagctgcactatcacgagcctttgtttttctccacaaagtatctaacaaaaccaatgtgcagactgattggcctggtcattggtctccgagagaggaggtttgcctgtgatttcctaattatcgctagggccaaggtgggatttgtaaagctttacaataatcattctggatagagtcctgggaggtccttggcagaactcagttaaatctttgaagaatatttgtagttatcttagaagatagcatgggaggtgaggattccaaaaacattttatttttaaaatatcctgtgtaacacttggctcttggtacctgtgggttagcatcaagttctccccagggtagaattcaatcagagctccagtttgcatttggatgtgtaaattacagtaatcccatttcccaaacctaaaatctgtttttctcatcagactctgagtaactggttgctgtgtcataacttcatagatgcaggaggctcaggtgatctgtttgagcagagcaccctaggcagcctgcagggaataacatactggccgttctgacctgttgccagcagatacacaggacatggatgaaattcccgtttcctctagtttcttcctgtagtactcctcttttagatcctaagtctcttacaaaagctttgaatactgtgaaaatgttttacattccatttcatttgtgttgtttttttaactgcattttaccagatgttttgatgttatcgcttatgttaatagtaattcccgtacgtgttcattttattttcatgctttttcagccatgtatcaatattcacttgactaaaatcactcaattaatcaaaaaaaaaaaaaaaa

SEQ ID NO: 259 - DNA, 3637 bp, Homo sapiens; identical to SEQ ID NO: 83

SEQ ID NO: 260 - DNA, 2208 bp, Homo sapiens
aacgcacttggcgcgcggcgcgggctgcagacggctgcgaggcgctgggcacaggtgtcctgatggcaaatttcaagggccacgcgcttccagggagtttcttcctgatcattgggctgtgttggtcagtgaagtacccgctgaagtactttagccacacgcggaagaacagcccactacattactatcagcgtctcgagatcgtcgaagccgcaattaggactttgttttccgtcactgggatcctggcagagcagtttgttccggatgggccccacctgcacctctaccatgagaaccactggataaagttaatgaattggcagcacagcaccatgtacctattctttgcagtctcaggaattgttgacatgctcacctatctggtcagccacgttcccttgggggtggacagactggttatggctgtggcagtattcatggaaggtttcctcttctactaccacgtccacaaccggcctccgctggaccagcacatccactcactcctgctgtatgctctgttcggagggtgtgttagtatctccctagaggtgatcttccgggaccacattgtgctggaacttttccgaaccagtctcatcattcttcagggaacctggttctggcagattgggtttgtgctgttcccaccttttggaacacccgaatgggaccagaaggatgatgccaacctcatgttcatcaccatgtgcttctgctggcactacctggctgccctcagcattgtggccgtcaactattctcttgtttactgccttttgactcggatgaagagacacggaaggggagaaatcattggaattcagaagctgaattcagatgacacttaccagaccgccctcttgagtggctcagatgaggaatgagccgagatgcggagggcgcagatgtcccactgcacagctggaatgaatggagttcatcccctccacctgaatgcctgctgtggtctgatcttaagggtctatatatttgcacctcctcattcaacacagggctggaggttctacaacaggaaatcaggcctacagcatcctgtgtatcttgcagttgggatttttaaacatactataaagtctgtgttggtatagtacccttcataaggaaaaatgaagtaatgcctataagtagcaggcctttgtgcctcagtgtcaagagaaatcaagagatgctaaaagctttacaatggaagtggcctcatggatgaatccggggtatgagcccaggagaacgtgctgcttttggtaacttatccctttttctcttaagaaagcaggtactttcttattagaaatatgttagaatgtgtaagcaaacgacagtgcctttagaattacaattctaacttacatattttttgaaagtaaaataattcacaagctttggtattttaaaattattgttaaacatatcataactaatcataccagggtactgcaataccactgtttataagtgacaaaattaggccaaaggtgatttttttttaaatcaggaagctggttactggctctactgagagttggagccctgatgttctgattcttcaaagtcaccctaaaagaagatctgacaggaaagctgtataatgagatagaaaaacgtcaggtatggaaggctttcagttttaatatggctgaaagcaaaggataacgaattcagaattagtaatgtaaaatcttgataccctaatcttgcttctggatctgttctttttttaaaaaaacttccttcaccgcgcctataatcctagcactttgggaggccgaggcaggcagatcacggggtcaggagatcaagaccatcctggctaacatggtgaaaccccgtctctactgaaaatacaaaaaattagccgggtgtggtggcgggcgcctgtagttccagctactcgggaggctgaggcaagagaatggcatgaacccggtaggggagcttgcagtgagcccagatcatgccactgtactccagcctaggtgacagagcaagactctgtctcaaaaacaagcaaacagacttccttcaacaaatatttattaaatatccactttgcaacagcactgaaatggctgtaaggactcctgagatatgtgtccagcaaggagtttacagtcaaacaggagagacatgcctgtagttacatccagtgtgatgggtgctgagaggcaagtacaaaccacgatg

SEQ ID NO: 261 - DNA, 1678 bp, Homo sapiens
  misc_feature (523)..(523): n is a, c, g, t or u
  misc_feature (569)..(569): n is a, c, g, t or u
  misc_feature (961)..(961): n is a, c, g, t or u
  misc_feature (1021)..(1021): n is a, c, g, t or u
  misc_feature (1066)..(1066): n is a, c, g, t or u
  misc_feature (1069)..(1069): n is a, c, g, t or u
  misc_feature (1194)..(1194): n is a, c, g, t or u
  misc_feature (1202)..(1202): n is a, c, g, t or u
  misc_feature (1287)..(1287): n is a, c, g, t or u
  misc_feature (1472)..(1472): n is a, c, g, t or u
tcccgccgcgccacttcgcctgcctccgtcccccgcccgccgcgccatgcctgtggccggctcggagctgccgcgccggcccttgccccccgccgcacaggagcgggacgccgagccgcgtccgccgcacggggagctgcagtacctggggcagatccaacacatcctccgctgcggcgtcaggaaggacgcccgcccgggcaccggtaccctgccggtattcggcatgcaggcgcgctacagcctgagagatgaattccctctgctgacaaccaaacgtgtgttctggaacggtgcttcggaggagctgctgtggcttatcaagggatccacaaacgctatagacctgtcttccccggcagcgaaaatctcgggatgccactggatcccgacactctctggacaccctgggattctccaccagagaagaacgcgacttgggcccagtttgtggctctcagcggaggcctcctgtggcagaatacatacatttccaatcagatcacttcccggacacggaccntgaccagcctgccaaaaagtggatttccccccaccccagaacccancccctgacgcacagaaaccaacccattcgttgttgccgccttgcgaaccccaaccagaatctctcccccctggccggcgcgcctgccgctgccaatgcccctatggcggcctcttggcccgcaccttccaattggtcgccctgcgcaaccagcgagaaaacactggcccgcccgtctcccccccgctccgcctaccccacttaatgcgcctccgtggcatgacgcacgcgtttggtgtccgccgccgtctcatgtccgcgcggtgtggacccccttttctctcgcggcacatcccccctattcccttgccctttggggggcaccccctctagacccgcgcttctcttctcgtccggtgggggacattggtttgcctgccgcggcgggggcgntaaaaataaaaacagcctgttagcccggcccagtacccccccccggccggggccgccttncgtttgcatttataccccaacccataaagccgcgcccctttagcnccntaacttttgtggtgtggcctcccccctttttcccggggagcagcaacggacatctgtacactaatgctggccccgacctttcccaaaaaccccccgcccgtgtcccgtataaatttggtgccaancctgacgngttctcccccgccctcgccccgttggccgcccgtttaaagcccccccggtggttgcgccgcccaacgagtccacctatagttaantccaccaacacccccaccttttcctccccgccgcatcttccccacgtacccccttttgtcgcgagatggccactcccccccccctgtttgtttaaaacaacgagaatggtgctgccaacgctggtcttttccccccccggaccgcgaccgccagggggaatacgtaccataagcccccgcgcccnccttttttcccccctccccgccaatcaagatccgccgtccattagacgtattatttttcccgcgatacacgaaaaaacagggccgcccatttataactaaattcccgtcgccgccgcgcggatatgtttcccaaaataccacccccccccccccattttctttgcccccaactcctgcgcaccggtgttcaccagcctcgcgccgc

SEQ ID NO: 262 - DNA, 1611 bp, Homo sapiens
ggacgcgtgggtcgacccacgcgtccggacccacgcgtccggtcgtgttctccgagttcctgtctctctgccaacgccgcccggatggcttcccaaaaccgcgacccagccgccactagcgtcgccgccgcccgtaaaggagctgagccgagcgggggcgccgcccggggtccggtgggcaaaaggctacagcaggagctgatgaccctcatggtgagtgattaagtgcccagaaccccagccttccatccaattttcagtagcctccttttttccgtcagcttttttgctagacataggggtaatgtaatttgctccctcctgggaaagaagttcatacaccccacctacaccatttcttccagcagtccctcctcccaattccatccccccacacgaagttatctcgaacacttccctgaagtcatacaagaccctccctatccagtgtgtccctacttcctagccccaaccaagctttacccacacccaactccccgcccttcttggtatttctagcctatgaatttggttgctttattttggatcagagtgatgagattaaggggaggctgggcgcggtagctcacaccttataatcccaaagtgctgggattacaggcgtgagccaccgcgcccggccagcaactaatattctaattgaactaaagcacaggatgccaatttacaatccttagaccaaagagtcactgatgtctccaccagataagaggaaagcatcaggctaggcatagtggctcacacctgtaatctcagcactttgggaggctgaggcaggcagatcacatgagcccaggagtttgagactggcctgggcaacatggtgaaaccctgtctctaaaataaaaactaaactaaaaaaactttttaaaaaggcagtggggagcatcagaaccagctcaacagtttgtctactgtccggtcccagagaaactcaagattctagcaagccccttgtgtggggcttgggttgggacatgaggctgctgctggagcttactctgcaactgtttctccaaatgccaggtatatgaagacctgaggtataagctctcgctagagttccccagtggctacccttacaatgcgcccacagtgaagttcctcacgccctgctatcaccccaacgtggacacccagggtaacatatgcctggacatcctgaaggaaaagtggtctgccctgtatgatgtcaggaccattctgctctccatccagagccttctaggagaacccaacattgatagtcccttgaacacacatgctgccgagctctggaaaaaccccacagcttttaagaagtacctgcaagaaacctactcaaagcaggtcaccagccaggagccctgacccaggctgcccagcctgtccttgtgtcgtctttttaatttttccttagatggtctgtcctttttgtgatttctgtataggactctttatcttgagctgtggtatttttgttttgtttttgtcttttaaattaagcctcggttgagcccttgtatattaaataaatgcatttttgtccttttttaaaaaaaaaataaaaaaaaaaaaaaaaaaaaaaaaaaaaaaaaaaaaaaaaaaaaa

SEQ ID NO: 263 - DNA, 1220 bp, Homo sapiens
gggagcgggcgagtaggagggggcgccgggctatatatatagcggctcggcctcgggcgggcctggcgctcagggaggcgcgcactgctcctcagagtcccagctccagccgcgcgctttccgcccggctcgccgctccatgcagccggggtagagcccggcgcccgggggccccgtcgcttgcctcccgcacctcctcggttgcgcactcctgcccgaggtcggccgtgcgctcccgcgggacgccacaggcgcagctctgccccccagcttcccgggcgcactgaccgcctgaccgacgcacggccctcgggccgggatgtcggggcccgggacggccgcggtagcgctgctcccggcggtcctgctggccttgctggcgccctgggcgggccgagggggcgccgccgcacccactgcacccaacggcacgctggaggccgagctggagcgccgctgggagagcctggtggcgctctcgttggcgcgcctgccggtggcagcgcagcccaaggaggcggccgtccagagcggcgccggcgactacctgctgggcatcaagcggctgcggcggctctactgcaacgtgggcatcggcttccacctccaggcgctccccgacggccgcatcggcggcgcgcacgcggacacccgcgacagcctgctggagctctcgcccgtggagcggggcgtggtgagcatcttcggcgtggccagccggttcttcgtggccatgagcagcaagggcaagctctatggctcgcccttcttcaccgatgagtgcacgttcaaggagattctccttcccaacaactacaacgcctacgagtcctacaagtaccccggcatgttcatcgccctgagcaagaatgggaagaccaagaaggggaaccgagtgtcgcccaccatgaaggtcacccacttcctccccaggctgtgaccctccagaggacccttgcctcagcctcgggaagcccctgggagggcagtgccgagggtcaccttggtgcactttcttcggatgaagagtttaatgcaagagtaggtgtaagatatttaaattaattatttaaatgtgtatatattgccaccaaattatttatagttctgcgggtgtgttttttaattttctggggggaaaaaaagacaaaacaaaaaaccaactctgacttttctggtgcaacagtggagaatcttaccattggatttctttaacttgt
